United States Patent Application Publication US 2026/0275333 A1 - sequence listing, part 29

SEQ ID NO: 3045 - RNA, 64444167 nt, Homo sapiens (residues 60,147,893-62,296,031 of 64,444,167)
  source 1..64444167: mol_type = mRNA
gcagcctgagtgactaacacatcacctgaggtgaagtagcccccattatattcttcatcaagacaccttgcattttccctttatagcaaccattccaatctgtgggaattttgctgatggtccttctgaaggtcaggcttggccaggtcagaacaatgaccctttcatgtatcattcacctctatggccctttccccaccccatggaaagcactgcagagcaaaaataggtgagcaacaaagacctattagaaaaataatttcaggatgtcaatcctgttagatgactttaaaattaatactttctatatttgcataagggtggattattttatactcacatggtcttaacatatccactcagaaaccctgtgaaatggtgggccggcaccgaggtatccagagagttatgtcctatttcaggaggagaaagccaaatattcaaagcagagagaaacctcactcttcagttttctttgtgaagagagcactctgaggatctgtttcataaataataaagaatgacagacacaaagagggagaagcaggaaaagatacaaagacaaagaggaaaggggaagcagtatggaagaaaacaggccaggcaggagcaggaagagaaagcgtggaaagttgcagagatgcagaggccaagggttggagaatgagccagggggagcagaaaaaataagcatggaatgtcacagagatgcaggggccacagggtggagagtgaggccaggggcagcataaagagtaagcatggaaagtctcagagatgcaggggctgtggagtggagagtgaggccagggggagcataaaaaagcatggaatgtcacagagatgcaagggccgcgaggtggagagagaggccaggcaggactgtaaagagtaagcatggaaagtctcagagatgcaggggctgaggggtggagagcaaggacacttgtgatagagtgggaagttcaaaaacccagagagggagcaggagcggtcctttcataataagatgtttggggcatcagactgttagagttggtatttaggcagacatgagcagggcagaagagggccccctgccccagggatgtcaggtgaccatcaggtgatagccaggttgttgttaagctgtctctaattggccatgcctggcactagggaaaggctgtcttccagtagacaggaaacatctgaagctggtgatcagcttcctgataggatctcaggagctggatgagtgggcccaagtatgtgcactaaatggcaaaatggcagagtttaactggtatgtgaccttcctctaggaatgcttacctggaaagggtaatgatcttgcacacaatttcagcaaacacactgtgcatgctcctctcccaagtgctggcaggccactgcatgggagcagcctgctgcaagggaagaatcagggaagaagaaatgtggaccctggagtcatgtcatacaagaccccacccaagtcgagggtcagacagagcacttgaatctctcaagtcgcctgcttggccctttccaactgtactttactccctttcattccttctctaaaactttttagtaaacttttactcctgctctaaaacttgcctcagtctctcaccctgcctgctgccccttggctgtattctttcttctgcaaggcaagaattgagttgctgcagacttgtacagatccacccctgctaacaagactagaccgcagcctccaaaggcagcccccacagtgggcgactgctgacatgggggtctggggaatgatgacctcagtcacaaatttgccttagactgatatatcatatgcacttaaatgtttatagaatggctggcaggtgccatgaaccaggggcaaggaaaggcttgggttgccccaaggttcagaacctcaagagcagttctaaagtagatagttctttctcttagcatggtggccaattccaagggaagatgctctgaataggatggcctcctgtatttgggagctgagactgcttgggattgctcagccagctcacttgcagactgaacactgaagctgtgtgtgtgacctccaggacagccccaatttctatgcccatgaccatgtgttgcatatagtttctttcttcttcattatcaggagctactttctatctggctcgacaggacaatgtgcccgatcatgtggagatcaaacatgttccccgaatgttgagtatgcagtgtgtgcacacacacaacccatgccttagatatatgacttgtcttcgtgaatcgtgaaagcataccttttcttccctcagcttgcctttccagaataacaataaggtaaagcccacatggctcccaaataggatctttggggattataattatctaataattgacaccaaagtgatcctcccgacttgaagtgggaggaaatttggatttctaaactagggcaaacgcttcttatgaagcatcaatgtgtgttgtgttccctattctctttgctttaaaaaataaagagaattatatttctttttcttcaggcaactttgcagactatcaaaagacatagatatctgaaaactgtatctgcctattccctgttagccgtcatttggaaataaatttgatccttggttactgcttgacataatgtacaggtgaccagcaggagggaaaccaaagtataaacagatccagtctgttgacagggattgaatgatgcagcaacttgattgcattgagccatttaaactttctttttcttttttaagctacaggttgaattaaaaaaatgaagtaaactcgagaaatccattaagccagattagtattgaactccagtcaagaccgtcacctgtggtcattagatctggctgtgggtgaaacaaaaagtaaagtctgactcctgcttctcatatccacacttatccaaatcacctgagattaaagaaaatcctttaactggtgttagagaggggacctaaggtagaagatgtaaagcatgaactacctacagtgatgccttgacaccatagaaccaaaagctccagacttctgttctgaggatggaaacgcggttcagctggacttaactgtgcttagaaccccacactggatgtgtatggttcccctaggaggaccagtagggaggcttacagagaggagccacaatgatagaaagcagtgactgctgggctaattaataacgataactgtgaaaggtcatgagtggagaattgaagaaaagaggaaactaatatttaaatgcctcccaatgtgtgatgcttaattcagagaatgaagtccaagtctgcaagcagtagattttgcattaaatgaactgaaattggaataggactcagtgggcatttcattttgccttggtcttaggttaagtaattaaaatcaacatcaggttgtgcctgaaaggtacagcaactgagcaacggctaactgttgtagcggcaaaattagcagaggatcaaagagaatttcagagtttcttgccagagtagatatgcataaaattctatcctctggtccaacaaaatacatacagggtacaattaaatttagctaagtaaattaagtataaattaactgatttttttatttcttacactgtattaacatttatcaagactttgaccaaaaagtagagattttatagttggaagggacccaggtgattagcctatcccccgtcctccattaagagcttcaccctcaccatttctcatttccctagacacatcattgttcacactctacttgaatcatcccagagacagagaactcactaccactcccttccacttttgaaatgacagtgggaaatgtgttgaattcatagaagagaatgatcaattgtcagattcaagacagacattgaaaaatgaaaaagttacgaagaggggatttcagaatgagtgcattctagtgatcacacgtgaggtgaaccccaaaacattgtaatgctagaaagtggaacattgtgtggcctatgctcacagcatcattgtgcgggaagaaactgggagaagggctatcattctttgaagggtggcttttctagcaaggatcgacttccatttctttgcttccagtgaagaaggttgagctcatcccaaaaggctaggatgaatagaagtggaatttctttgagagcttacattgttgaatggtttggatcatggcagtagtctcctaactcacctaccatcagtcctgcaaactctgttaaattttatccattcagcatctagagattagatattattttaaaaatatttttataataaaggattactttatgaacaataatgtgcacaggtcttaccatcttaagtatctatttcaatgagttttgtcaacggtgtgtgctcctgtgatcgtccacccaaggcatgatatagaatacttttgccatgaaacccctaaacaaaaagttccctagtctcctttccagttgatacccttagtctggaaaggcaagcaccttctgattctgtcactgcaggtgagtttatctgtgttcttcgatctcatacaaatgaaagcacacagaatgcctactttgggcaatggctttatttttgtgactcagtcatggtattgtgtattagcagtagtccttgcctttttattgccaagaagcattttatgaatatacttcaatgtgtttatctactcatctgttgatggacatttatgtccagttatgagctattataaacaaggctgttgtgaacactcttgtacaagtctttttgtggacacagattttcatctctcttaggtgaatctcaagagggcagacttgttgggttataggggacttgtatattttttatagaaaactgccaaaaagttctccaaggtgctattctaccctcctgccagcaacatatgagagtttctatcactctgtgtccttgccaacatagggtattgtcagtcattttcacttcggtcttactagtgaatgtgaaatcgtatcttgctttaatctagtttttcctaatgactaatggggttaaatgccttttcatgtgcttactagccattttatgtcttcttttgtgaagtgcctgttaaagtctttttcccactcttttaattggagtgtttgtctttttattattgattttttggagtcatttaaacattccggatatgagtcctttgttagacaaatgtgttatggatattttcttctctgtggttgtgtattcatttgccaaatggtgtcttttaaatagcaaatttttttatgaatcccatgtaacctttatttttcctttttgcctttatgttttcttctagaagttttatggctatagcttttacatttcagtttattacatgttattgtaattattattttggagtggagcaaggcgaggtcaagcatttattttcccctggatacagctgtccatttgtttctgcagtatttgtttaaagcgctttcttttctccattgagttgacttgatgcctttctcaaaaatcaatgtatgggtctctttctgtacctttcattctttccactgatggaggtatattctatttttgtgccagtatcaactcatcctgattactataactttatgtaaaccttgaagcagaaattataagtcctgtgactttgtttttttaagattattctattttagatcctttgaatttccatataaattatagcattagcttttcaattgatgcaaaaaacctgatattattttcactgggattgtgttttatctatgaatcaacttgaggagaataggcatcttaacaatattagtttatcaggctgtgagcatttatttagtttttaaaattaatttgtattattacaatacaacatacacttgggttgcatagaatgtttcagtcaatgatgaactgcataatcaacggtggtctcacaagaatatagtaccatattttactgtgttgagatatgttcagatacacaaataccattttgttacaattgcctacagcattcagtatagttacatgctgtacaggtttgtagcccaggagcaataggctctaccagatatagcctaggtgtgttgtaacctgaaccatctgggtttgtgtaagtatagtctatgatgtttctataaggacaaaatcatataatgacccatttctcagtagatatcctgcttgttaagagataaatgactgtattatagttttcagtgatgaggtcttacagatcttttgttagattattctaggtatttaatattttggaatgccactgtaaatatatatgtatacaggttaaaatgttcgttttcccattgttactgcttgtatattggaaatacacttgagtttggtgtatttatattctgtaacctttgtaaattcaattaagtctagtagtttttctttgcagattctattgattttttttcatttacacaattgtgtctgtagtagggacagatacacattgtttttctcagtgattatagtttctttattttttcttatttcaacagctaagacctctagtacagtgttcaatggaactggtgagaaaagacgtccttgctgtgttcctgatatgaagaggaaagcagtccttctccattaagtaaagtataaaccttaggtttttcatagatgtcctttgtcagatttcgaaatttctctgctattctcattttgctgaaagttttaaaaaattatttaaataacggattttgaattttgtcaagtacattttatgcatttattgaaataattatatggttattcttcttaatttcatttatgtagtgagttataccaattgagttttgaatgttgaaaccaccagaattcctgggttaagctctattcagttatgataaattttatatattgccatatttgctgatattttgcgattgtactatgaaggatattggtctgtaattttatttgtttgatttgtcatgttttgctactatggttatgctgccctaaaacaagtggaggaactgttccttcttcctttttctcctctttaaaagaatatacatttggtattattttctttctccaacattggatagcattcacagtgaagttatctggatgatatttaactcttggaaagtttttgattacaaattcaaattctttaaaagatatcgatcatttagatatactaattcttgtgtcacttttgttggctgtgtttttcaaagaatgtttccattttatctgactcgttaagtttattgataaaacatcattcctcctgttattcttttaatgtctgtagaatgtctggtaatattgcctcttacggtcttcatattggtgatttatatgttctccatttttcttataagtcttaatagaagtttgtaaattgtattaatcttttcacagaaccaaactttgacctttgattttctctattgtttctttgttttctatttctttgactaccacccattttaaaatcacttgctttatttaacttccttcagttaaacatgttctttttctagctaattaagtcgaaagctcagttcgctgattttaaaccttcctttaagtatatatatacatctataaagatataagttacctctagacatcaattcagcagcatcctaaaattttgatattttattatttgtcttgttattcagtagatctgatttcaatttttccttgtcatttattcgttgatatacattatttagaggcattttaacaaatttcaaaccattttaaggttttctagaaatcatattattttcttaggttataccattttaattagagaacatactctgtgcgtttcaatgttctgcatttatagggacttgtttttatggcccagcattgctttatcttgttggctgttcaatgggtatttaaatacttacgttgattgagaatgttgagcaaatttttataaccttataaatttattgtttagttgttctagtaattactgagagagaagtggtaaaacctctaactaatattgtggatttgtctgtttctctcatttcgctgtgaatttttacttaaattttcacaatcttgtttttttttttttttgcctaatatgtagcactgttacatcttatcaattaacacttaacataattatgaaatttccctcattgtctttattaataccacttacatagaaatttttttctgatattaatgtaattttcttatgtttattttttgcccaatatatgtttatccacacattacttttaacccgtatgtctatagttaaagaatgtttttagtaaatagcatatagttgtatcttcattttttttccttgaaactgacaatctctgcctttcacatgtttagtctactaacagtgtcgtagtcaataagattgtatttcagtctattattttgtcatttaaaaagatggtcccatttattctttgttgttctcttccttctttcctatcttcttttgggttaactaaatatttttgtagtattccatttaatctcctttttttttttaaaaaaagcaattattttaacatttagtggttctatatatcacaatatttatctttaaattatcaaacacatcttcaaataataatttgccatgtcatgaacaatgtgaatttttttttttagactgagtcttgctctgtcaccaggctacagtgcagtggcacgatgttggctcactacaatctctgcctcccaggttcaagcaattctcctgcctcagaatcctgagtagctgggattacaggcgcccgccaccacgtccagcaaatttttgtatttttagtagagacggggtctcaccatgatggtgtcgatctcctgacctcgtgatccgcccgcctcagcctcccaaagtgttgggattacaggcgtgagccaccgtgccccacaatgtgaatattttataaccacataactctatttatttcctacactactctgtcctcttagtgtcatgtattttacctctgtatgttatgcacctgcaatacttttattcgtgctttaagcagctcatagtgtggtataatttctcataatcctaaacaaggtctgttagcattttttttggcagcacatatctgctggatgtgaattatttcagcttttgtctacataaaaaagtctttatatttcttaattttgaagtatattttaacaggatagtatactgtagattgggaggtttttttttctcttagacttttaaaaatattgtttcattgttttgggccaccacagttcttattgtgaagtagcttacattctttttagtgcttcactgtatgcaatatcttttctttcccctgtggatgcttttaagatgtcttctctgtctttgatatcatcagtttgagtatgttattcttagttgcagttttctttgtatctatcctgtttggggtttgctgagattcttggatctctagattgatgtctttcatccctttctagtaatttccaacaatgatttcaaatatttttcttcattctttatttccaattttggggggcttcaatcacacttatattaaatacttcatattgactcacagttgtcattctctaacatttaaaaaaattgctctttttggaatataaatcgttctattacaaaggcacatgcatattatgttcattgtggcaccattcacaatagcaaagacatggaatcaaacgaaatgcccatcaatggtatgctgggtaaagaaaatgtacatatacaccatggaatactatgtggccataagaaagatcaagattatgtcctttgcaggaacatggagggagctggagtccattttcctaagtgaactaacacaggaacagaaaaccaaagactgtaggttctcacttataagtgggagttaaatggtgagaacacgtggatacatagagtggaacaacacatactggagcctattgaagggtggagggtgggaagagggagaggatccagaaaaataactattggtactcagcttaatacctgggtgatgaaataatctatacaacaaacccccatgttacaagcttacctatactacaaacttgtacatgtacccctgaacttaaaaattaaatttaaaaaattgcttttactctctttgtgttgcagatagaataatttctaatgtcctttcttcaagtttccaaatccttctgatatccagtctataaaattaataaaatatttttttgtatcatgttattcaattattgaatttccaattgttatttaagggtttgaatattctgcaaaatttttctacctatctactagacctttaacacatttttcatagtgatattaaagtccttatctattaattcaatgattaggttatctgtggatttacttctaatgactgttttctctcttgaaaatggttcaccttttcctcctttctatgtctcataatttttaatcctattctagatattgcctgtatgaagacagtagatattgaataaatatctactggaaaggtggtgtgcctcttcttttgtcaggacacaagtgttggcagctgagtagatccaatctgccttagagctgggtctaggctttcataagactcatcccgatagggaattaattcatttaggcttgtctcatttttacctctctggtgggtctttaaaaactgattttgtggtccatctgtcttgttctcatcgttcatgtggtattaactacctcttgcaactttctgcattcttgtgataacagatttctattaactttgttgttattatgatgtgatgattttaccaactgcaacaactattttaatccatgttaactcattaaactgtaacagaaatcataggcagggtgtgttgctctatgaaaattgaggggatggggctatgaaaacttgtgggcttggaagagaactgtgctatttcttattgaacaaaataatgattaatggcagggactgttggaaaccagctggtttccatacctgctttaaaagcaacactcaactttaagaagcaatagactggatagagaaactgtggtatatatacatatagtcttaaagagaataacggagtatgtccaagaggagacaaactgggggaagggaaaaaggtagaaaggaaggggagaaagaacgggaaagggaggaagaggaggaggaaatagcaaaagagaaagaggaggagaaagcggaggaggagaagaactgatggagggagggagagagaaagagaaccttcatacaattcaaacccctacagtggtcatctctgaataccaatcccttgggcttctcaattatgagttcttacattccctgttttgaccgagactggtttgagtttcgtcccagtttagcaactgaaaggattttaactataaattgattactttctgttcagtggctgtatcttaacctatttttacatctagttaaagtagaagttggcaaattgtaaccaatgggccaaatctggcccactctctgcttttatatagcccatgagctaagaataagaatagtcattgcattttagaatggttgaaagatgaaagaatatgacattcgtaaggcatatgaaattcaaatgtcagtgtcttaaataaagtttttttggaacacagccaagccattcattaatgtatcatctatagctaccttattctcatacacgtgaggcagaattgagaagctgaactgagactggatggctcacaaagcctaaaatattcaccatctgcccctttacagaaaatgtttgccaatccctgacctaaagaacctactgcagaaagcattggcattactggggccgttaagaagataccctttatttagggatgagaaggggtcagaaagccccatgttcattctagaattgccccttaaagctctgacctcacagtctctgcctccctcacctttctttgcctctctctgtttgggcaccagcatgttccaggctctgtggttgggggcggggatgcagtggggagcagtcacgagtgaaaattgcacttgactgaaggtccagagaccatttactcaccatgcaattcctggaaactcacccaacccctctgacctccagatagtgaagtggggtacttaatgacacccttttcctaggttaactgggaagatcaagtgcataatgatacatgtctgttacatagaaatgggcagcaaatgcttcctctcactagtattgtgagaagcagtgagataaactttgggacagcactttgtaaatgataatgcacagctgaagggaagtaaatataatgttataataatggctacatgtttagttaggacctaaatgacttcagagtcactacattttcccccctttgattaaataattttatattgcaaacctaatcgatgcccttgaaaaatttagaatagtgcaaaaatataaacaatgaaaagcaagactccactgtccctcacacattcttcccaagggcagatgaggttgttatttttatacacttcagaaatggtctctgcacatatcactagtgaatatttggggtgtgtgtatgtatttgtgtgtatgtgcctataccaccatctctttttcatatcaatgaccataacataacctgatctttacttgactgcatttacttaaaaaaattattacattcaccagggatatgttcaagaatgtctaaagcagtactatttgaaatagctaaaaactggagaggacctaaatatctgtcaacatgaggatgagtcagcaaattgtatatttatacaatagaatgttatccattgatgagaatgaatgaagtacaaatgtaaatggccccaggacttagctatgaggtcacaagttaggacagtggtcatcctgtgtaagagagaccctggatgggtgcctacaatgtcctactccctgtagctgttggctgcccaatgtgtagactttgtgaaaattcatcatcacatatggtttgtgcacatttctgtaagcatgattttcttcaataaaattcatgctagaaatttaaaaaaacatatcttggaagtcaatttcagaacatatgggtttgccgccttctctttcatagctgtagacacctttattgtacggacaaatggcattttccctcagactcccaccctctcatgcacacttgtttctggctatttgctgttgagtgcattttccaagatattttctaatcacccttctaaacagaagcaggttgttatgagcacagacagatgataccttggtgcatgggaccaattctgccctgcagatgccaagagggagctcagcctgttccaggccaccacacaggtgtgtggagccctgaccctttgtgaaccaacaatggcatcgtgtgggcagacatgctgcctgcatggacgcattgctgctaatgggtattcccaaggcatgggttgttatttgcattttctcattgtcacgagcacccaatgttctgaatattaatgaaacaatttccagcctcctttgcaggcttaaaatattgagcatcagacatactgctttgttcccatttcagccaagtttaatttctcttaaccagctttgttgttgtaaagtaaaattaatgtatgatttcagtgtttaaatctcaattctcggcaattcacgacagattgcaagtgaatgtgatttgttcgttaacacctaatgggttgaaataatttattgcacaaacatttccaggaaaacgaagccacttgagcaagagcaaagcaggaaatgttacttgtttatctaataaactaccctagggtgagcgagtacattagcattgcacaaactttgtgacttatttatcatcactatttattattaaaactttatctgcttcaacttagtgaatggctgccttgggatataccgcttgcagcaacaacaacaaaataaagtttatgcaatttgcataatattgtacaaagaatattagcttagaacaatatgaatccctggatcatttgcacagccctttggtgtttaatgttggtaaatatttaaataacagcaagcctgtataattataaagatttctctttctaatctgccctggatgtacagctgttgtaaatcaccacattcatgtgatttgactgggagaatgttagggatgatgaaaaagcacttgttgcttatgctggcaaagatgatggagacagaagcacctgcaggagaagtctgagacaagatgctgaggtcttgctgtatttcctttttgatggtttacgacagcgttggtgtttcacatgaactgggtcctgcatagagtaagcatgcaggagatgggtctctacagttccagctcctctttcatgaatggaatatttgcctattaagaaaaaatatgattcatacccctgggcttttgcacatgctattttctctctgggtcattctccctatgtgtcacctgctcacctcctagttgtggctcactcatccttttggtttcagcgtaaacctctgcattctttgtgatgcccacttgcccctgctgggtctagcttggtctccctattaagcaccttcttgatgctttgcattgctctctcatagctgagtcgctcaaatgtcttttttctccactggactctgagccccatgaagcggggggatgtgtctatgttggccagtgtggcaaatggtaaatcctgatttacagttttgttgaattaaaaaaatgaataactgaatgcctatagtaatccatttaaagaagtgtctgcataagccatcatcacaggctatgttaacctttcatattagacacattaaaaatgaatgctggctgggcgcagtggctcacgcctgtaaaccctgcactttgggaggccgaggcaggtggatcacctgaggtcaggagttcaacaccagcctggccaacatggtgaaaccctgtctctactaaaaatacaaaaaattagcctggtatggtggcgtgttcctgtagtcctagctacttgggagggtgaggcatgagaattgcttgaacctgggttgcagagattgcagtgagccgagatcgtgccactgcactccagcctgggcaacagagtgagactctgtctgaaaaacagtaaaaaaagaatgctatgctaatatgctaatgccttatgttggtgagagtctgcagatgtgggagctctgaaataattcacaagaacactttagatgcgtgaggcaaaagtcttaaagtgattattttatttttggctcagcaaatacgtttgtgggaatttaccctaaagcagtaatttgggaacgtgtggacatatttaggaccaaggatattcatcacaatgtcgtttaaaattgtgagaaattgtaaacaacttaaatggtcaacggtagagaattagctgagagagttgtaatttatctaaatgacagaatactatgaaggtattaaaataatgatttagaaatatgttaatgacatggaagaggtttatgatatactctggggtgaataaagcaaatatcaagccttatgaaactatgattccattttttgaaatagcatttatgtaggcaaatgactagaaacttatattaaaatgttaagtcattttctgtggtttggcatgattttgtttttaatgtgatacttttcaaaatcaaaagcaaaatgagacaaataaacctatgcattgagttgttggtttaaccctcacagagggacatcagttaagttactataaaaaacagttacttggctgtacatcttaatggaatatacgttaaggacgtaaataacatcaaagaaattttattttcttttcagtaattatactgttaataataactttggtattttgtttggaaactacttaagtaaattctaggagaaatcaaattatgttaacatgaacaagaaataatatatttagcttaagagagaaaaatataaaagaattgaaataaaaaccctgcaaccttaaatttgaattgaaaatatcagcatagatgcccaatatactttcacttaaaagatacattttccgcctctgtcaactgagcaaaccctgaaagaacttaactagtagcaatggatgtacttagcacctgcactgtcactgctgagcacctatccactaaaacaaagcagggattcttggagaaatggctgactcctaatctggggcacgaaatatatgagaagatcccagatcatcttactcaaccccaggaagcaaaagaaaaggttgctgggtctcctcggaggacccagtagctgacctaaataggcttccaccggacagaggtcacacactcagggcttcagtaagaataacaacgtggaatggaaacacatcgtctgtgttcccatccatgtgtaaaagacagacaacagacaacaatggagcaagacacatcaaccatgtcgaaatccacaggtaaagcacaaaaccaccacagaagcagcagcaaatcaacaccatcacgaaatggattgaaagaatgatagggaaccaactcacaattttgaaaaccagcaaataaagagaaaaaattgagcatttttcctgccttaattttacaactgtacctcaggataacacagtggtttatttgggaacgtttctttttatattgaagagttccagctcaataataatgatggatgatagaattcgaatatcataatttttcagcctcaaaggcaataattggacgatgctgtcatccccaatgactgttggcatcacaaaaaagagcaacaacctggtattgtgtctctagatgaaagtacatgataccacttaggggttttcttgaaaaatattgaacctgaagaccagggatagagcaatacgttaaatgataccacagggttgtaatcaacaaattttagaatgtgagagaccctatgtcgtcactgacaaataaattgtgaagccattaaaaagagaggaggaagaacctacagatagagatttaagggtcatattaggcaactgcaaggcgaggccttctttggatcctaacttgaataagccaactatatatataaacacatacacactatatgtaaaatatatatatacacacacactatatatataaaatatacactatatatatgcatatactatatataaaatttatatatacacactatgtaaaaatatatacacaattctatgtatacacacaccatatatataaaatatgtatacatacaactatgtatacacacacactgtatatatatactatgtatgtacacacacatatatatacacactatataaaatgaatactaatgcctagtgctgagagtttagagatgttttacactatataaaaaaatatatacacacaactatatatatacacacacatatgtgcaatcagggaaatgttgactttccctggatgttggttatataaagacgttattgtcatatgttatgctgataatggtattgtggccatttaaaaagtcttgtattttagagatacgtgtgaattatttccagaaaaaaataagctcaccagaacgtgcaacagaggtagcttcttttgactttcactaattttttaggtccttgagactgttctgttttgaatactcaagatgagatttaattattttcagtgctcagaaattttcttctataattttattgatccttgccacaactccatttattctgtttctcattttgtaattcccttgggtaaatgaggtatcctgggctggttctatatttctcttttccttttttctccaaattcatcattcaatcataatagaattaattgaattaaatgaagttgatccaaagcaacttatatcccacatcttatatgccaacttatatgcaacttatatgcaacttatatgccaacatctagatttcacatcagccagatatcacgacaatggaaagcttgaaatatgaaagaaaaaatacaaagatccttcttattttgtaggaaagtgaagtttacggaaaaaaactaacaatcaccttttattctgtagagaagcagtgagagctgagagcttcagacacattggaaataatatgaagtatttgaatcaattatatgacggcaacaaagaataattctatttttgtgggtcaaccactaattgcagtataatgttctcagcactttcatctgtcattgctgggaaatattaatgggactcttaagaccaaggcttcagcacaactattgggtaattagggcacgaatccccatgcatacttaattgtatgatataggaccaggctaactttagagtgggggtggtttcagaatgacaatacagagaaacacctccttggtttctataactctaagacatcagattaaattgagtatgttgaaaagaattgcactgaaatatcccagactgtgtttctgttctaattagcttatttacaaagtttagttcatctatttttccaaaaagacgtttctctggactgcccgacaattctgtagtcttctagttactgaaatccagctcaaaacataggttcatttcccttttaaaagggaatttattgtctcatataatggaaaagccagaagccagcatcccaggcatggtggatccaggtgcataaatggcgtcctcaggaatcagttcctgttctcgtgtctttccacctggtgatgaaggtggtcaccaggagtttctggccacatcttaccagtttagcaaccctgctataaagagcactaaggctctcgttagcctagctgtggtcacatttgcagccctaagcacatcacttggccagggggatgctgtccattggccaagcttgggtcccaggcccacctctgaaaccacaatatgggttcaacctcccatacgccaaatggcagagggtagttctttggtggaaactttgtctccacaacctagaaaagggagaatgaacattgggcaggcagaaatcacaacagacatcttttgtggaattttaaataacttctggaatattagtcactgctctgtctagcctgactgtttccaggcttgctaaaggaacaatagcaaggctgacttgaaatgctggcagaagctttgctgttctgtatttgagggtaaaagaaggagcagtttgaggagaatgtgaatgttgagctgtccatctgtctttctctctaaggatgcaaaagcaagaatggtcagatatacatttactgatggatcgttgactttttaaaattcctatgaaaaagcaacctgtaatcctttgagattttagaagtgataaaatgaatcccctctagtcaactaccctaatgggaaatacaacagacacttatttattctagctttacattaacaaaggttatgtgatagaatagctttcaagaatgctgtttctagaactttctgtttggtcaaagaatgaatattatacagtcacaaacacatggccagccacctgaggaaaggcagcatctaaatgacactatgagataggaagttcaaatagtcaagtgtttattaaggtgggtattctgaagtctcatcaaactttagcccacatatattgagcaatgactgtatactgtatgatttactgtgccttgggcatgcagatatattaatgacatgacctctggtgtctaacagggatgatctgcttataacaggttctacatcagattaattcaaagaaaatggagaagaggacttatagtgaaatgtcaggaattttatgtttttcaataaatggagcttcattcctagacctactgatggaatgaatagagtaaaattcaattttaggatttttgttccaaaagtccttacagctaaggggcgtagatgttaatctctgaaatgggtgagtttgttttgtcttaaattgtgtactgccaggatatatgatgtcagacaaaatagattcaggcattgatttccgggtgagtttaattgattgctatttctttctgcttgactagagattgaggtttgctgatgtttctgcatgtctaatataatttccatttggtatttggcttgcttatgtaaaggaatacatattcaattgagttgagaaagaccagaccatggttgttcaaaaccctggggatgtggcttatgcttgttagcacttagtcttctctggtttctacacacagtttcattgtgacaccaagctccctgtcaactttcaccacaaaataagtacaaaaatatttacatgggtgtaaagactgatggttgccttaacatctatggccagtggagggaaataactcattagaaggattagaagacctgggccaatttaaaattatgtataaatgccagattctaatgagcatttcagccacagtgggtgacagtaaattaatgtaagcaaggtttgtcttcttttctttactttctcaaatctcagtgggagacatgtagagttggggcctgttgctaccatctcaagtacaaacatttctttatgtctgtagtgaaagtggggatctgttgttgggtcatttcagcccatctcaacaaatgcaggtatcgaagtgtgtgtttgcaggatgaagacaagctgcattccaggaagaaagttttcaggcaaatagtttcaggaccaatcatcagttatatcaggacaaacaggacttcttcatgatcgagggagcccaggctattgtcaattcctgaagcttccaatacattgaaaaatgaaggaatcttgaaacaggttataaaaattggatatatttatattcttttcattgaagaaatttatgctttttacacagtcaagtgcagtgactaaatgcgtgatcttacttgaggatatgtctagcaattactccctggacatttgggaatataaggccaataccatgaaagacagagggcagaggaagaaggaagctggattttaggctatgtcactgaaccactgaatgactcctcacctgaaatcctcaggtaaatgtcctactgctatactcttcgtagttgagccagtaaattattttctaagtcaggatgagttaggtgctggttccttgcagctgaaatcatcctagctgatgtggacctgcttctgcccagtgcctccaccctttaaccactcttagcactcacacaatgctgaggctgtcttcatttaattgaaaggttaattataggtggaggtctgttgtagaatatgtggttattttggtctctgcaacagtaaacaggtttgacagtgctctgactgacttgactggatggatggattgttgatatgacataattctagctattagctgtcaatcctttcatcctgaaagatgctgttttctcatttctttacactggtttgacaatttatacagcttgaaatgctttcctatgcattatctcatctgatcataaatccacacttggggttatagaatagacattttctactttttcagtggaggaagctgagacagcagccgccccaggccaacataaacatagaatccagggctccccatgaaatgtgtgtgacctccctggctccacatggatgggccagtctaatcagtgtctgcattgttggtctgcattaggctataagcgactgaatacagtgactcagaccaatccaagcagcaaggatatccatggtgctatgtaacaagaaattcggagtcagaatgcggtctaggcatggatgtcaggctctggagactatctgcatttttctggtctcccattgcctttgagggattggcgtcatcctccagagatggcaaggtggccacagctgatccaggcattatctgactcaacaacatccaggagcaggaccttctcttctcctgttctttattggagcctggaaaccttttccataaggacatgcagcagacatttccattttatctgcactgggtccatgcccactcccccatcagtcattgaaggggaaagggagcctataatcctcttagaataacctgctgatgagaatcagttgttggatagtgaaccacagtaacccccacagcatgcatctaaaatgcgctgacctagagtatgcagcaggtgaagaaagttggcctggacatggtggatggctgctgtcacagcccctcatttgttcatgcctctctgtgtcctggtatttgcgtcagtgtggtccactctcacgctgactcaggacctggccagaggacttgtttaggtcaatgagaaaaaaatcaaatattacacaaagggcttgtcttctatttgctcttgggaactgttacggactgattgcatcccactaaaattcataggttgaagccctaactcccaatgtgactgtatttgaatgtaaagcctttaaggaagtaattaaagttaaatgtggccagaagggtagggccctactctgataggactgtgttcttataagaggagggagagataccagagactacttcctctccacaggctcacagaggaaaggtcacatgaggacagagcaagaaggcacccgtccacaagccaggaagagaggcctcactggaaaccagtcctgctggcatcttgatcttaaatttccagccttcagaactgtgagaaagtgaagtcatattgtttaaggccccccatagtcggtggtattctgttatggcagttctagcaaactcatacaagaactttacaaccaccatcccaagaacaagcctgggcaggcctgctgggtgataaaagatgggacacctaggtaccttcatggcctcagcctgcagccagccagcctgtaggcaggcacgttagttcaatgaccaccagctgaccacagatgagtgagtctagtgagaccagtagaagagctacctacttgagcccagcccaggtttcagacacacataattaaaagccaaataaatgcttgttttaagtcactgagttgtggggaggtttgttattcagctatacgtaatcgacacatgtaggatatagaggttttcagccacatactcaattgaaacaacttgagttgcacatcctttgttggtctgattgggaatgcaatttattgacactgttggtcaaagccatatctacagggatcaggtagtcaggcaaatgagcaagacaagctgcatagaaaaataatcatcaggcccttttagtttgagttttgttgtacatatttggataaatgtacagatacagaaatagccacagaccataggaaagcaactgtctaagagaggtgccggatgacaactggtacacacagtctcaaggatggggattcagtagggagtggtggggactatggggagctggaatgagcatgtcactaacagagatagccactgttccgctccagcccttgttgctatgtaggcatgtgggcccagtgttttgctatgagaatttccaatttttcaacaaataccagaaatctggatttttatgtaacattttatatttttaaaacactgattcacttggaagtaaaacactgaacaggcaaaataaaactcattttaggctaaactgccactttgtaatgtctgctctgcacaaactggctaacagtagagttagaagtcagtaaactaccctgatgtcaagtggctggtttggctgagtttttactttcctatttgtttgggatttgcatatttatagtgtacagatgcaaatgaaaggctttgcagaaaagtggattctgaatccaaaatataatagacaggaaataaaacaatgaaaaaaatacagtctttgattgcaggtctttctgcctccaagctcagagaaaacaaacaaaatgcaaaaacctaatatgggtaaacccagtaagaaaagtttttcaaaatcagaaaacaaataaatgggggtttggacctttgcattccaaaattattctcagccagatggtgaatttcttgaattaagtcagggaccagattttatttatttttgtatccagggcagctggaagcatcgaatcaagtttaagtgaatgaatgaatcaatgaatgaatatttcacatggatttataggtaattaacatatggcccatgtgttggggagtggccctgtgtgcgttaccaccatgctgtttggagtcaggagacatggctttttatctgacctactcttccgttttagccacattagttatgtaacctctgtgtgtctccatttctcatgtgtgaagtgaggataataaaaaatgcatacctgttagtgctgtgaagatgcgatggaacctgcctgtaactgtacttcatggcctgacatggagctcgggtccagtaaatgtttctgaggttgatgcctagttagttttaaacagtggattaccaggggagtgggcaggagaagatgacacctactttactcctcttcagggacacggattttgagtccagcaacctgaatttggactagcttatgccaacacattctttctatggattctgtgagaatcagctcaggtcacctcttgggcagaggtctgaggaatctggaaagcaacccagtgctgtttccaaagcattgtcaacagcaatgaggcagatgctgcccttgggaatgattctttgctacagaattggccattttcagcaacacacagtgatgttgtaataaggagataaaacatgtgagtctatagccggccttttatggggtgttcgatgcatcccagttgttcttaaataagcaaagagaaattgcatcctctaggccggtggaagcttgcggcttttcattttctgcctctttttgggtattgttgctttccttttcactttgctctaataaggaatgttctctctagagcaaaataaatgccaatcttatgcgtttctgaagggagagctattgtggttggaaactactgaataattctcagagtattattttgtcattattactcaacctttactatcatattcctgatgttggctgggacctcctggtcctctgaggcacatagacaaggtcagggccagctcccatcacgtcccatactcggaaaggaaaaacctgcactgaaacttctcctctcctccagtgggcagcagggtgagcggtgactcagaaggtgggagctcattctcatggcttctttgcatcccaggggacacctgccttgcctgtgggctattttgccccatgttgaaccagatggaaaaaatctttttctttacaaatcataaatttgccctgttcacatacaatgtatgtgaatacagaaaccttaaaaaaaaaaaaaaaggctgggtgtggtggctcacgcctgtaatcccagcactttgggaggctgaggtgggcggatcatgaggtcaggagatcgagaccatcctggctaacacagtaaaaccccatctctacaaaaatacggaaaaaaaaaaaaaaattagccgggcgtggtggcgggcgcctgtagtcccagctacttgggaggctgaggcaggagaatggcgtgaacccgaggggcggagcttgcagtgagctgagattgcaccactgcactctggcctgggtgacagagtgagactccatctcaaaaaaaaaaaaaaaaatagagataagaatgatgaggatgaggggggaaaacttgtactggaataaagagagaaaaaaagaagttcatgtagaatagtcaggtaatgctgttaaaatgccctttgaccaccccactccttcgccagggagtttctctgattcactcgatatttcttgctcctccgtcagattgttcctaaaactccaaactctcagggtatttgcaacctctgcaaggtccacgctctaacctaacaacaaatccatgaagacacagcaggcagcaaggcatcccttcaatggggcgtgcaccccttcaagagcagttgaagttacaagaggaatcttttatttctgttatgttttcaacaatcacatttactggttaattagtgaggtgagcgtatgtcctggcttatgccagttgttctagtgtgattattaagaatgcctgtgggcactgtccaattgtcccactttcgatcatgaattaaatggtcactccatatacttgctttactcattgcttatctggagtggcactatacaatagatatataatagaagccaaatgtgtaatttaaatttttctggtagtcctattaaaacaaaaggaaaaaggtaaaattacttttaataatatactttttctcctgcctcagcctcccaagtagctgggattacaggcacccaccacaacgcctggctaatttttgtatttttttagtagagatggggtttcatcatgttggccaggctagtcttgaactcctgacctcagttgatccacctgcctcagcctcccaaaatgctagttgcagtgagccgacatggtgccactatcctccagcctgggcaacagagtgaaactccatctcaaaaaaaataaatacatattatactttattaaccccatatatccaaaatactatcaatttgacatgttgtccacataaaacatgtaatgggatactttacctttctcttttgtaggaaatccttgaaatccagcagagcatgtattttaattgtggcacctctcagtttggactaactacattccaagtgctcaatagcaaaatatggctattggacactggattggatgctcagatctaggtccatattactcatttttataaatgttttaatggtacaagggtgaataatcacagaataatcacagaaggtagaagctgtaaaattgtactttgagtgtggggaggggtacataaggacctctttccaaaagttgaatatcttatggaactttaatatgtaagatcagcacaaatagcatagtgttagaataaattattgtgtataaatttaaaatttcaatatatagttaatatacaaggggacttcaaaatgttcatggaaaaatcgaattaagagataaaaataaagaatataaactttcttaacataagctccattaaggtcaagatacttttgtaagcaaggacaccaaccatttagaccatccccaaagaactgagcatcctgggaattgaaccatgtcagttcagtcctttttccattattaactgaagaaaaatgggtttcctttacaatttttttaatattaggagacaaaaaaaaagtcaaaaggagacaaatcaggtctgtaaggtgcatgcctaatgattttccatcaaaatattccccaaattgcccttgtttgatgaaaggaatgagcaggaacattcttgtggtggagaaggactctctggtaggctttcctgggtttttttgctgctgacgctttggctttctcaaaacactgtcataacaagcagatgttattgttctttggcctcataggagtcagtaagcaaatttgagcagcccaaaaagctgttgtcatgacttttggtctagcccagtgctcttgtattttgactgggtcactcttggtagctgttgctttggttgtgctttgtcttcgggatggtactggtgaagccatgtttcacttcctgttacaattctttaaagaagtgcttcaggagcttgattccacttgtttaaaattttcattgaaagctcgtcacttgtctgcagctgatataggtgcaacaattttggcacccattgagtagaaatttgctcaactgtattttttcagtcagaattgtgcaaactgaaccaactgagatgtctatggtgttggtgattgattgcactgttaattgtcaatcctcttcaattagggcatgaacatgatgcatgttttccttgcaaattaggggtgtggtctctgctgctgcaggcttcatcttcaacattgtgttgtctcttcatataatgagttatccatttgtaaactgatgatttctttggggcattgtcctcatacattttttgtaaagcatcaatcatttcacactcttccacacaaacttcaccataaacttgatgtttgttcttgtttcatttttagcagaattcatgttgctctgataggggctctttgcaaactgttgtcttatccttctttgtacttcaaactagatcctattcagacaagttataacaagttagtatgagtttattttggtgcaaaaattgaaaattttcaaaaaaaattaaaaaattttttgaaatccacacatggtttttaaataatacatattttccaagatttgttgaagctatcttgtatatttaataaatataataagaaaattaaaagaaacgatttgtaaaatgttaaaataatcaacctcatgtttctgccactcaacttcaacacctaccattccctgataatctcgttttacaggtactcctgcccactccccaactaatggttttaagatttacatgtatctctgagagataaagattcttgtttttacacatagctacaatagtatttaaaatatcaataattcctcaatttcattcactacctagtcagtgcacaaatttccccaggtaccttataaatttttcttttacatttagtttgttcaaatcagagtctaaataaggtccatacattgcaattggttgataaatttctcaatattttttatctgtatttttcctcatctcttataatttactggtttattagtcctatggagtttttcgcagtttcgattttaatgcttgattctctggggtgttatttaatgttcctctgttctctgtgcatctgtaaactgatagggctaaaggttggaggaaattccgaatagaaactttggcaaaaatatttcataggtagcatcaaagggtacatcacatctggatgcctttttcttctttttgagtttgcgtgcgtgtgtgtgtgtgtgtgtgagagagagagatgggtggggagagggacaaaaggaagaaaaaaggtagattgagagatggggggaggaacagagagagtgggcagagagagaaagagagagattacatcaatcattgttgatcactgcataagaccttaattcagtaagtgtgacaacattagaatgcccttgttctgtcatttatttctcatttgtttggtggaacgtctctgtcagaataattcttccaattcaagtccttggttactctgagatatagtttgtataggaaatttaggataaaaacttaaatctttccccttttatttactaattttcaaaataacttcacttcctggcattctccagaggtgaccaatcagtttttattttcttttttgttttcgaggtagaggatggtattattaactcataggtttgaacatgtttgatgtacttcaatggactgtgattatctctggccagtgggagctgctgcaggttgattgtgactttgtctgctgtcagacatgacacgatgtctaggctaatcttgtacatttctcgacctacaactttgattcagccatttccccatgaggaaattgaaaccgagaatagcatcagcgttgaaactggggttgcattatttaaaactcttttgcttgcaagtagcaggaattccaacccaaactgcccaggcatggtgtcattcattggctcccatgatataaagagctgggactggatttgggggcaggctgacacaggggctcaagccctctatgggagctggtgtctctccctccacttccctgctgcatttcctttaggtggccccaggggagatattaaaactatttagcaaccacgcactgaggatcagaaggaacacaggccaaagttttgagtggctcctggaagacccctgctgtgccagcattacttcttcagttgctgcattgtggggagatacaggaggaccagaggaggggctggggtgacaggtggtagagggagaacttggaggacctgagggtggtggctatttgccagcaagtatggcggtattttgacagtttaacaaccaactcagtctccccagggctacctagtctagttggttccattctctgacccgctctttgcacatggtggccagatggccgtactcctcacatccagccaagaaaggcaaggctaacccaagtccagagagtcacttggatggactgaggtggaccgtgtgcccgggaatgagctgagttgattagctcgtcccaggctccattccaggagctggggccagagctgcacgtgtaccaggactgagcatggggaggtgaagaccataaataaaaattgggattatggccaggggaaagggtaccagctgtggcaggacagcaccatgtgcccaccacagaaggggcagaggacatttgcaccttatgttagtttcaaggtcaaatttgcttttatgttttgttttggttgcagaatattaagaatgttaggcttcacattggtatagaggtaaaaattgtagatgttttcaacaccttgccttcctatctcatcaattacactaatcagtgtgattgaaagagaagcagtaggaaacattttccaacatgaattgaaacaccaacaatcaggactggtgtgtaatttgtgggacctaatgcgaaatgaaaaggtggatcccttgttcaaaagttattaaaaatgtcaagacagcaatggcagagtagtaaacctgtggggccctgtgtgtctgtacagcattgccaacaatatctggtaacagcccacatttctttccttgaatagaaagatcagacaagaagcaccctaaaatttcaagtgctgaaatgtctatatgaactaagggtcaacctcaatgtggtgtgtactcaccgttgtgcacagttagtgcagtggtgaggaggccaggctctggcctcttaatgcttctgtttttcagttctccccactcactggctctgtggccttgggccaatgatttcactccacctcactttatcctctccctctgtaaaatgcgagaataacatgatctaccttgtgggattgttttaaggatttggtatgagatatgaaaataatttgaaaggagatcatggaaattaatgtactcagaacggggctgttacagaatgctcactctacgtaggctttagctggtatctcagtgacaaatgttatagttattatacctaaagcgtgcatacacaatgtgtcatacatgtaggcgtactgcatgtgatgctggagcacgccccacacaggtgcttcccagtcttgcctggcacgtggttgagagaggcacgtgtgtgcttcatcagcttgatgcttagataattttatctgagtaaaatggaaaaagcactgaattttttaaatgcacaatgcagagttacagccttcttaaccagtaaaacatgttcaaggaagttaaattatgcacaaaaattgcgtgagaatttattcgaagttctgcagaaacacagtttaacctgtgctataatttgatatatatgacatttaagcatattgctctttattatacaggtttttttgaaaatagttaaaatacattttaagaaaaagaaatttgagcacaatcttggcagaacccttgaacttcttatcatttccacaaaggtctttgtgatcctgggatatggggcccccagagaaaggcctcataagtgagttccttacaatgggcacctgctttttattattaaacagtaaaaagaaaatcccttcccaaacccaaacttgattgaaacttcatcttaaaataatgaaatgaaactaggaagatatgtttatcttataattaatatttacattataatcacaactataagctaattttaaaatagagaaagaataaaccaagttgacttccttccaatttttttttaattgtggtaaaatatatgtaacctaaaatgtagcattttaaccaattttagcatatagtcagtggcattgaggacattcccattgtaaaaccctcaccttcatatatctccaaaactttttcatcatcccaaactaaagctctgtccccattaaccaacaactctccattcccccttcccccagcccctggcagccaccatgcaacttcccctccctatgcattcgaccactctaggtacgtcatataagtgaaatgacacatggtggtccttttgtgactagtgagtgttaattgtttgtagaattttccaaaccaggttgtatgacagcacaataaaatatccttccctttctgcttgactttcacagaaccatcaggaagaggacattttgtagagtcattcaagggcttcattcaagggcttcatcaattttgcaagaatattctttaagtttttatgtggaaatgagttatagtaaagtattacttgagcacagtgcatgtcttctgtcttcagcccagtcaactttcacatccgggtacttccatgtggccatcctcagatgcagatctagaacattgccaccacccagagtcttctcacgtgattctttgcaggtgttaactcctctccactcacaggtcaccgctgtgctgactttccttacctcaggctagtttcccctcttccccaacctcatagaaatggagttgttatcctgagttcttctgcgtctggcttttcacccagcctgtctgtcatctgtgaggctcatcctggcgactgttctttgcagctcactcgttgttatgactttgagctatttcttgccatgcaagtactatcatttatttatccattcctctcctgatggacctttgggttgttttaattgcctgttataaagatgctataaccactctgccaagaacatttcttaattcaaatgattttttcttcgaaaatgtctgcgttgtcaccattcttataaattctcttttcggttcttgtctctgccgaagaatcctcttgcgaatgcctctgcacaagactctgtgttttccaaaatcacagttatctgtttcataacaccatacatcatttgtgagatctttacacttcctttgaaaccaatttgtcttgtccttttagatgctgacaacatgagcctcccgtggtcggaacgggcttgtgaaggcggtgctggggtgcaccagggcagcagctacaggtgagtaggcggggacatttgaaaggggctaattttctcgtggtcctttatagggggatgtttgtatgttaagacagctctttcttccctatacaactctgtagctggggttgagtgcatgtaaactcagctaacaaaatcttcttgcattcggtttgaggtctattgctctgcagaatccccaggcctgccactttcctggcacatcttctcagcccttaggctcaggctgcagtctttgattagtggtgcatgtatgtgcgacggggacagttgtcactgaaattacagacagctgaatggtgatttgaattgcatgagcattaaggcctttcttaagagagatatgcaaaacccatggtttgattctcttgaagcatcgggaaggcctgtatagataaatccccctgacatcaacatagcggggacactctaagaacctaattttaatgaatatacattttgactttccaactgcaagagaatgagggcagatttgtttagatcttcctaattaatagcccaggttgactgtacttttctgtttaatataactgatttcatctcattaagggagaggtagaaattagatgcattctccacttcctggtaagaatatcttcttattataagctgggcataaaaacccatcatggcatgcgtactgggactgctgtgttctgggtggagccacgttcggaagaccttgtctgtaatgaaatgggacatttttctgtacttagttaataatctttgggcagcatttgatcatttgaaaaaagtcacaccattcacttgatcaggaggcatctgcagggaatgcaggtcgggcctgagtcctgttggcccaggaacaggtagttgtggcgtcaggcaatttttgttgttgttgttgatgttgttgtttttgagacagaggctcgctctgtcgcccaggctggagtgcagtggcactatcttggttcactgcaacctccgactccctggttcaagcgattctcctgcctcagcctcccgagtagctggaattacaggcacgcaccaccaagcccagataatttttgtatttttagtagagacggggttttaccatgttggccaggatggtcttgatcttctgaccttgtgatctgcccacctcagcctcccaaagtgctgggattacaggagtgagccaatgtgcccggcctgaggtgtttttttagtcaggtaattgaggtgtttccaccaggacaaagcctcttggtggctgagagggaccccactgaactctctgctgaccgatgggggagcatgctaagtgcttaggaacattagcacataccttgtgaaactgatgtttttatggtcaaaaagggttggatatcagcacttccataagatacagtggacattgggacgcacatttactcccagtgaccccccactctgttccttggtgctctgtgtccccacctcagctgctctgggctgtggctttctgctcagcagttcttgttttgttactgctgttgttgccttggggtgagaaaggatttgtatccgcacacagaggaagatgaaaaatgtcatatttctttatttcgtaaaagactgaattaaatacgactctcaagcaatatcttggcaggctggtgggaaattcaatctcagacattttggacttccttgtgccttccttttggggcacagacattctggaggttttggtgagttcgagggtggctgtgctggtctccatctctggtgctcactactgatgaccttgtgcatgctgtatcattatttcgaaagatgattttatctcagtgttttgaataaacattttccactgtgctccaagggcctcccagtggactgatgggtattagttcccagatatgggtctttgtggaggttgtaggccccgtgaggcaggggaccacacctgtcttaatcactgcttcacctccagagcccggaacagcgcctggttcatagtgtccaataattattgagtgattgatttaaacggaaaaagtctcaggggtaactgaatcaggaagttgaggattttaggagtaatctggatacagttccttctggactaacagacaacttaggtagagaaaacattgttgaaatatacttacattattcagcagaaagagacctgaggaataataaaacactagaaaggaaatcactaaggaattatcagtagactttctgcaagcagtacatttgtataatttattactggatatataacaatatgatctcttttaaaatatacttatttcaatataacatacataaatgtacataaataatactttgtgtagttaatgagtctttacctactcaaaggaagaaagagaaggttatcagcatctagaaagcacactcctgccccctcccaattacagccttctcaaaatctaatccctatcagagggtctatcattaggaattaattctgattgttgaactttatacccaatgtgtacagagtgtgctttcttttgtgttggacttccttcactcatcgttatgtgtgggagatgcacccatgttgtgtgtggttgtagtgtattcattttcattgcaatgtaatattccactgaagaagaagtcgtgatttatgcattatactgttgagggccgtttgggatgcctacaataaataacagtgctataacatccttgttcctgtttctggtggattcatgcaaacatttctattgagtggaattctatttaggagtggaattactggctgacttagatcacattccccagaagcaagagtctgagatgggtcttactgtgcaagtgatttacagaaagggtgctctcaggaggaagctgggaggaagcaagggaaggaggagacagcctgggagaagctataccatatatgggttcgggtagagtccagggcagcctgatgccatagggagctctggggggtgaccagcaccacagcattgatcctctgagggctttggtatcttttcatcagccagacattggctgggtgtcatcccagaggggtggggataacattgtgaagcatctgtatgtgtgatggctcccatcagcaaaatcactctctggaaaaggtgtgggacctcagcagctaacactctgaggagctgggacatcggtgccctggctcataaaatggcctgggtgggtcaccaagcatgtctgctacactaaggcagcaaggagccaatggccagtattagcaggcattgctagtgtttgtatggataggaatacctcgagcatcgtaggagggtttctgttgttccagcttctcaccaacactaggtattatctgatttttcattttagccattttttccattgtgctcatttggctaataagatacagtggtatcttgttgtgactttaatttgcattttcccgatgactaataaggctccctttccttatgtttattgctgtgtgtttatattattttaagaagtgtctcaagaactctacaattacgtcgtctttaattgggtcgtctgcctttttcttattgtgtgggttaattacctattctggactgtagtcctcatcagatatttgctttagaaatgccttctccatcactacggttgtcctttttaatcttgtaacatatcctttgctcaacagaagttcttaattttaatgaaatccagtgtcatctttttccttttatggtttgtgccatttgccctatttaaggaatctttgtctgccccaagcccatgaagatattgttttatattatcatctagaaacttcattttaattttcacctttcatatttagagcaccaaagctttgggaacagatctttgcctatagtgtgaggtggtatctctttagtcataaatcaaagaaccctatgtatggtctgtatctcatttttcatttgattggctctgttttctattccagtagttctcaaccgggggtaaatttttcccccaacaggggacattttgcaatttctggagtcgttttttgttgtcacaagtgtgtgcagaggctgctactggcatctcatgggtagagaccagggatgttgctaagcaacctacatcacacaggacactccctaataaaaaaaccatccagccccaaatgtcagtaatgctgaggttggctaagaaacctggcctgtgactacaccaaggccacagtgtctcactggctgtggctgtggctctggctccacaatcagcccctgcttttggtgttgtgacctgtaattctgtgattctttccaggcatacttggtgctgcttttttttttttctatgtaaatttttgaatcattttgttagtgtccaaaaaaacaaaaaacaaacaaacaaacaaaaaaacaaaaacaaaaacaaaaaaaaacgctgctgggatttttataggattgcctataatctatacatcaacttgaggaaaactggcacctttccaataagaactcttataatccacgaacatgatatatccttccatttacctaggtcttttatattttctattttctaaatttttttatttttttattattatactttaagttttagggtacatgcgcacaatgtgcaggctagttacatatgtatacatgtgccatgctggtgtgctgcacccattaactcatcatctagcattaggaatatctcccagtgctatccctcccccctccccgccccccacaacaggccccagagtgtgatgttccccttcctgtgtccatgtgttctcattgttcagttcccacctatgagtgagaatatgcggtgtttggttttttgttcttacgatagtttactgagaatgatgatttccgatttcatccatgtccctgcaaaggacatgaactcatcattttttatggctgcatagtattccatggtgtatatgtgccacattttcttaatccggtctatcattgttggacatttgggtgggttccaagtctttgctattgtgaataatgccgctatggtgtttttttgttgttgttgttgttggtttttctttataggaatctagcaagtcttctgttagattcattcctggcttttgtacatttctactgatattgtaaatactattcttcacatttcggtttctagttgcttgttactggcattaaaatgaaatgacttttgtgtattgacatgcacgtagcagtgatgctgaattctcttaataattcaatagtttgtgaattcttttggattttctacatagtattagataggagagtcttatctttttcttttcatgttttattatattgattgattgcttacttattgtcctggttaggagctccagtacaattttgaataatggctgtgcccaggctggttttgaactcctggctttgaacaatcctcctgtgtcagcctcctacagtgctgggatgacaggcgtgagccaccgtacccagccttgttttctatttgaatatatcctgtatcttcctttatattcctttcattctacttcaggttttttggtttttccaaatgtaatttcttgagattggtagtcagacaattgatctttcagctttcttctctcctacataggcatttaagaccatgaattttcctctaagcatggcttagctgcataccacacattttgatatgttgatatatcattgagatgttgatatgtgtgtgtaagtatgtaaaacgttttacatgtattttaaatgtatgcaaattctacagctgttgggtgacgtgttctacacatgtacattaagtcaggcgtgtcagtcagaatgcatgaatcttttgtatgtttttctggcattttgtctgcttattctattaattccttagagaggtatgttaaagtctatcgtattcattgtagatttcctgtttcctcttttattcccaccaagttttgtctcatatatttcgaatatatgttaattaggtacatgcaaatttaaaatgatcatatttctctgacatattcttttgccacgatgagacatccgtctttatttctagtaatgctcctttctttaaaattgatttgcatattagtctaggaaaccaccattcttttgattactgtatgcatgccttttttcccatgttttaatgttcaacccgttagtatcctcatgtagaaagtgtgtctcttttacatcatacatttaaaaaaaatctaatcagacattcttgctttttaaactggagcatttaatccatttatgtgttatgcaagtactaatatatttgagtttataattttgctatttgttttttctgttacctgttcttcccttccttgctttcttttatatgaatcaatgttttcatgattttatattctcccctttttaccttgttatacatccttttgctgttattttaataggtaaactagaaattataacatgtattcttgtgtcactacagtgcctctgtctaatctaattagcacttttaccacttcccagacaattcaattaccctagaacactttaacttcatttaacccctttaccatttgtgttatgggtatattttatttctatatatatatttcaagcaccacaagacagcgtcactcttatgattcagtactctgaacaattcttgagactcatatatctacatacatttttctgttctctacatcttcctgaatttctgtgcaggattgttgtattataccggtggacatctctttaatatcttagttaggcctgctaatttttgtttgtctggaaatatgtctattaatcttcacttttcaatgatattttcactgggcatagaattctagtttggatattagttcctttaaccactttaaaggtgtctttttttttttttttttttactggtttccaccatttctgttgagaagttaactgtcattattactgtttactcctttgaaagtaatgcctcatgtggcttttctccttaagaacctaagagtggttactatcacatgaactttaaatattttttttttaaagagaggagaaaaaaataacctaagtgtggctttcttttcctgtatcctgcttgtcagttctattgttacttctttgtgataaagtgggtttttaaaatctggttgcttttcagtttttctttgtcttagattctcaattatttcattaagatgtccccaggtgtgattttctttttatttaaacttcttagagttcataacatttttgaatatatacttctataattttatcagttttaaaatattcttgaccatcaccttatcaaatagggcgccttcccacctttattccttcatctctttggggactgtagttaatatgtatatttagtattataatcacatgtgtattttctatcatttttccccttttgcacttcaatgtgggtatttttctattctatcatccagctcatgagtcctctttttagttctatctaatgtgctgttagacttgtctattgagtatgtaatttcagttactttatttttgagtttttggatgtccagtttcaatttgagactctaattctctactagaactccccattttattatttattttcttgtatatgttaaccatagttctttaaaaatccataccttatgactgtaatgtatggatcatctatggatatgcttctgttgtctgctttttctctgtgtcttatttcatggtatacatgctaatttttgaactttttcttgaatgatggtgcagagcctctctacggtattacagtcttacagagaagaattttattttatttgagtttatatcaggcagttatatcaggggaagaccactcaggctaatcagaatttggttgatcacttcaggactgggtttctactctgtaagacagggtcttttttcttctatttgccgcttttcccaggtatacctctgaacttcactttttcttttttagccctgtaagactgctgaaagccatgcttagtttctccgacatctagaactgtttgtgcttgtctttctaaccttttgctagtccccacttacgcattggcaaatatctcaaggggaaaaccagagtagaaatgctgggcttgtgtctcaatgcttgccttccctccaagatcttggacctatgtgtcctggtagccatcatgtccttgaatataaccttcatctcccatctctataaactgccaaaagctctgctcagctcccacttcatgcttggctttctgctcaggttctcagccttttgcccacataacttgcaaactaaataaacctcaaagtgaaagcaatggagaatactcgtctcatctaaatatgttttctttttctccgggatcttggactatctgtcttcgtttggtagacctttctccaaccttgaaaataacacaatcacgtaaaattcacctttttaatatacatatttcatctagtttttgtgtgtgtatgttttcagcaaaagatttgtcttgctgcagactagtcctttatatcatcaaccagatgactaatatatatcttagtcacttgatttcctattataaaataacatcctatgtatcagtttttgttctaagcaacaaaaaagcaaagattgtttttgttctaagcaacagaagctgactctggttaacttaaattaattttttttaaggtgtactatctgggattggcattaccatgaccttcattgtgtatctgaggctctgaggctctggaaggttgagtaacaggcccaaggttgcagaggcaatagggagtgatgtagggatccaaactgatgctccccagcccacagatgccattgtgtcctgctactccccagtgacaaggtagtttcacacacagttgtaagaaataatgcagagaaatcttgcatacccttctttcagctttccccaatcttgcaaaactagggtacaagtgtatatcaagacaaggatgttggcattgacacactcaaccaacttcattgacatggcaccaatttaatgtgcaccctgatatagactgaatgtgtcccctcaaaattcctatgttgaaatcctaatcccaaaggtgatggtcttaggagatacggctttggaaggtgattagaacatgagggtggggccttcatgaatggggttcgtgcccttatgaaagggaccgcagagagctctcgtgccctcttttctccatgtcagtggcagtttgcagcctggaaagggtctttaccggaaccaggctgtgctggcatcttgatcttgaatttctagcctccaaaactaggagaaaaacctgaagcaggctttagaaactagaatccttcttccccaaagcaagccatgacacctagaaaggtcactcttacctcttcccttctcccctgaagttcctcattgtccttcctcatacccggggcgggggaggaatgttttgcagaaacacagaaaagaatctgaacaaaccggccttgctgaagatccccccagattattaccattagatcatacccattttgttccattttacttctccacaaattaaatttttcatcagacttattataaaaatacatagttttccctgggtctttgaatattcatttcgggaggctcctcacattaacctttataaaaataaatgtgttatgctttctcctggcaatctgccttttgttacagggttgtcggtcaagacccttgccatgggtgaggaaaaggtgctttttcttccctacacgtgggtatttagttccctgtaattttatgccacgtgtagattcttgtgaacatcacttcagtccagaaacagcatatccgtcataaggccccttgtgccactttgtcatagccacaccacgcgctttccttgtcaaactctggcaaccatggacctgcctcccatctctaaaattttgccattttaagaaagttatataaatggaatcatgtactaagtaacccattgagattggtgtttttcactcaaggtaattcccttgaaatccaaccaggttttctcacgcatcagtagttcaccccttttcattgctgagaggtatcccacaggggtttcctttcaggattgtataagatacactatgttgaaagcttagaatggtgacattataggtgcctactgcataatgggacatcctgtaatggaagctggtgcttttcctctatgcagaaacatgatgtaatttttaaaaattgagttcaattacacatgcaactttaggacagaagagatcaagttaccctggattaagtgttcagttacgaacggtattgggaggctgaattgagatgcctccctctcctgcagaacttagaaacactggcttcaacagggctttaagaaatagatcaacacgtaattccccagatgagagaggcagagccagctagggagggagagagaaggctggctgggacctgggtgaatttattaacaacttcaggatgaggttgtgtcattcaaagaaggtttgctgtgctcaggaagctgtgtataaatcccactggcaaatactgggagtttcatttagaacctctctgaggggtagagagagctttagccatggaggcaatctggccagggtggcaaagcccatcaggtgaagctgatgcatcttcctaacccagtgacattaaacattgaacacccctccctcttcctgtgtctattccaggctccccaggctatgtgctgattatttgtggtacccccattgtctgcctgcagggaaataatgcaggaatcatagagactttgagcatcctgtgcccagcatgagttacttctcattctaaaatcaaacaaatgatgctctgaatacaagttggcttcttatgcctaccatgcacgggcaatcttttcaatcaccatgataattacaggacattttgctgccatttattgaacacttattaggtgccaggctccccaggaagccctctgtgcatattattttgtgtcaatccccgctccaatcctatgaggtaggattgagagaggggattaacaatccacagtgtgcaggtggcatcactgggatttgaatctaggtgggtttgatgccagagtctgtgttcttgaccacaaaatgacagagatgagttactgtaagttaaaaattggcatttggagcttagacttcagctgtaaaaacttggcatatgtggggttgccattgtgagaaggatcagctcttgatgtgctggcaaaccagcatctgtaaagtctgtgaccacagcctgaaccagggcacatttgcaggctgaagaggacagtagaaatcatgataatgttgtataacaatgatgggggtcattgtttagaatgagctccgttttaggcgcaacagaccaaccagaccagaatggattcatccatactaagtgccatgtaatcaaactgactcatacggaccagttttccaaaaaacaggagattcctagcagcagttggaagaagccccatttgtctgaaacagcatgatacagaagttccctccattttgaccttataaggaaagtaacctgtaatgcccattctactttttattccttttttcagccataaagtccatctccttttctcagcttacaggatcttctttctaaagctttagatggaatgttgcctgacacatgactcactaatgaaagccagctacatctctaaactaaattggtgagaatgctacttattttttttaacaacagtaataagaggaagagtagaatagctaaaacttagtaaatgaatatttgggtcaagtgctgttctatgtgctttacacatgttaactcattaatccttaaaacaagcctttgagataaaaacaatggcattagctgcatttggtagatgaggaaatggaggcacatgggggcgaggtgacttggtgacttgtccaagtcatacagtggtgaggagcagagctgggattcaagctggacagccttggtccagagggcacatacttcactgtggatctgtgccatcccctccattattcagggccacaatggaggagctctgggcctcctgtgctgggtgctggcctggccatcctttgaggggagggggacactgccaggctcttgttgcagaggaggaagactagatgccctgcagtgtctgggagtacttctagctgcttcttctcaggtgaggaggaatcatttgatctgtcaaaatgagtttgggccagtgagggttacccaggtcacaaactctggttaagcagaagaggatctagtaagagcatgagaactctgcttgggaaatggcaagatcaagggcagagttatggtccaggtagcaggagctggcaccaggcatctcaactcagtgtatctggtgggaatcaggttaactcttttccctatcttgtgtcatcttggctaacagaatatctgggggttggtggaaagagagctcatgagattgccccagcttgagttccagtgcccctttaccccaacattgctaagcaatgaagcaacggcagggcatcttgacttatagccagtaaccagcccaccccaccaagcaatggcagggcaccttgaatgacagccagcctaccccactaagcaatggccgggcaccttgactgacagccgacataccccactaagcaatggccgggcaccttgactgacagccgacataccccactaagcaatggccgggcaccttgactgatagccagcctcccccactaagcaatggcagggcaccttgactgacagccagcctaccccactaagcaatggcagggcaccttgactgacagccagcccagtgcactaagcaatggcagggcacttgacttatagccagcccatcccactaagcaaaggcagggcaccttgacttatagccagcccaccccaccaagcaatggcaggacacctgacttgcagccagcccactcgactaagcaatagcaggacaacttgacttgtagccagctcaccccaccagcaatggcaggataccttgacatggagccagcctacactactagacaatggcagggaaccttaacatacagccagcccaccccaccaagcaatggcagaatacctttacttatagctatcctactcaactaagcagggcactttgacctcccaccaacccaagaccatacacagtgggagaggggcaatttccccaaagggagatgggcattgtgcaaaaagtagggaaatagatgttggggtagcccaacccaagcaaatcccctaaagaagtgtgtggtccacagccaccatattgggtaaaacaggggaggcaagtgctttgggtggtgactgcagaagaggagaaacagtccctaacattctgccaatttacctgttaaaagtcctgtgtctcttcaatgggtccttgcagtctctagggaaactcaatttcccataaatgatggttaaaacaataaaataatttcatcaaacttgggcatattacatttggctatctttaaagtggaagaaagtctggaatcatccattttccctctcattacctttaatttccttgccatcattttttttaaaaccaagttaaatccattaaaaagtcaatgaaaatgaatgggtctttactggacatgcacacaatgtccctttatgcagaaattgcccgaaaaattgccaaagaatttacctccataattgggatgtctctaaaagtttaagaaagtgccagtttgtcaaaaagaaaggtaaaaggagatgaaacaagttcaaaggtatttcaaaaggaaaagacttcaaatgggaagtttccaaatgattcctttggtcctaaggataagatatttgtgcagaatagttggctggaggtgctggtccctcgacactgctatgtggaggtgagacctgtgagtgcttgaagagagagaatgccagtgtgcatatctgcatccaacagggacaggggcccacatattttattgggagcagttgcttttaatttttgtaaggctttgaaattaccaaaattgggatgcttttgctcatcatgaaatggctaaactttgcagtgaaggtgttctaaagtaatgttcccgaagagaatggacggagcacctccctgacctgcccctgcaaatcctgctgactcttctgcacaaataccttttcctacagtcccctccccactgagaaatccagcaaggctgggactcagcaagtggcttagagctgtgagatatgagacttcaagaatgaatgttgtatagaaagaacttttggtacattggtccctggaaaaacacagttctgcataacattctatttttataaaatgaatttttctgtggtcagttaagagaaacccatttgagcccttagcattgtgtacatttgtgtattcaggtctcttgggaatcctacacaaaagaaattcagataacttagtgaaattcagtctctttcaaatatattgaacaatataccctttgttccaaggaatatattttttggaaatgctctttttctttttttttttaagtttaagttctgggatacatgtgcaggatgtgcaggtgtgttacataggtaaacatgcaccatggtggttttttgcacttatcaacacatcaccgaggcattaagcctagcatgcattagctatttttcctggtgctcttcctcctcgcacgacccctcccccgatgacaagccccagtgtgtgttgttccctttcctgggcccatgtgttctcattgtcatctcctacttataagtgagaatatgtagtgtttggttttctgttccatggataatggcttccagctccatccatgtctctgcaaaggacataatcttgttcctttttatggctgcatagtattcctcagtgtatatatacaacattttctttatctagtctatcattgatggggatttcggttgactccatgtctttgctattgtgaatagtgctgcaatgaatgtatgtgtgcatgtgtctttataattaatattcctttgtgtctatacccagtaatgggattgctgggtcaaatgttatttctggttctaagtctttgaggaattgccacactatttttcacaagggttgaacgaatttatattcccaccaacagtgtaaaagtgttcctgtgtctccatagcctcaccagcatctctcgtttcttgactttttaatagtagccattctgactggtgtgagatggtgtctcatagtgggtttgatttgcatttctctagtgatcagtgatattgacatatttttagtgatcagtgatgttgagctctttttcatatgtttattgtctttgagaagtgtctgttcatgtccttcacccactttttaatggggttgtttttttcttgtaaatttgtttaagttccttgtagattctgtatattagccctttgtcagatggatagattgtgaaaattttctcccattctataggttgtctgttcactctgattgtagtttcttttgctgtgcagaagctctttaattaaatcccatttgtcaatttttgcttctgttacaaattgcttttgaggttttcattatgaaagctttgcctgtgcctaggtcctgaatggtattgcctagattttcttctagggtttttatagttttgggttttacgtttaagtctttaatccatcttgagttaatttttgcataaggtgtaaggaaggggtccagtttcagtttccctcatatggcttgccagttttcccagcaccactaattaaatagggaatcctttccccatttcttgtttttgtcaggtttgtcaaagatcagatggttgtagatgtgcagtcttatttctgagttattctgttccattggtctatgtgtctgtttctgtactggtaccatgctgttttggttactatagacttgtagtataatttgaagttagtggcatgatgcctccagctttgttctttttgcttaggattgtcttggatgtacaggctcttttttgattccatatgcattttaatgtagtttttttctaattctgtgaagaatgtcaatggtagtttaatgggaatagcattgaatctataaattactttgggcattatggccattttcacaatattgattcttcctatccataagcatggaatgtttttctttttgtttgtgtcctctctgatttccttaagtagtggtttgtagttttccttgaagaagtccttcactttccttgttagctgtattcctaggtattttaacctttttgtagcaattgtgaatgggaggtcattcatgaattgactctctacttgtctaatgttgtataggaatgcttatgatttttgcacattgattttgtatcctgatactttgctgaagttgcttatcagtttaataagcttttgggctgagatgatggggttttctaaatatagaatcatgtcatctgcaaacagagacagttgacttcctctcttcctgtttggataccctttatttctttctcttcccggatgccttggccagaacttccaatactatattgaaaaggagtggtgagagaggacatccttgtattgtgccagttttcaagggaatgcttccagcttttgcccattcagtatgatactgggtgtgggtttgtcataaatggctcttattatttggaggtatattccttcaatacctagtttattaagagtttttaatatgaagggatgtcgaattttactgaaggccttttctgtacctattgagataatcatgtggtttttatctttggttctgtttacatgaggaattacgtttattgatttgtatatgttgaactagccttgcatcctgaggatgaagccaacttgattgtggtagatgagctttttgatatgctgctggatttagtttgccaatattttattgaggattttgcattgatgttcatcagggatattggcctgaattttctttttttgttgtatctttgccaggttttggtatcagaactgtgctggtctcataaactcataaaatgagttagggaggagtccctccttttcaattgtttggaatagtttcagaagaaatggtaccagcacctcattgaacctctggtataattcagccataaatccatctggtcctgggcttttactggttggcaggctatttattactgcctcagtttcagaacttgtttcggtctattcagggattcaacttcttcttgtttcagtcatgggaggatatatgtgtccaggaatttttccatttcctctagattttctagtttattttcatagaggtgtttatagtattctttgatgtttgtttgtatttctgtggggtcagtagtgatatcccctttatcattttctattgtgtctatttgattcttctctcttttcttctttattaatctagctagtggtctattttattaatttttttcaaaaaaaaactggattagctattttcctgaagggtttttcatgtatctatctcatacagttccactctgattttggttatttcttgtcttctgctagctttggggtttgttcgttcttggttctctagttcttttagttgtgatgtcagaatgtcgatttgagatctacttttttgatgtgggcgtttagtgatatcaatttccctcttaacactgctttagctgtgtctcagattctggtatcttgtctctttcttctcattggtttcaaataacttcttgattttggccttaatttaattatttatgcaggaatcatttaggagcaggttgttcaatttccatgtagttgtgtggttttgagtgaatttcttaatcttgagttctaatttgattgtgttgtggtctgatggactgtcatgatttcagttcttttgcatttgctgaggggtgttttacttccaattatgtgatcaattttagagtgacatgtggtgccaagaagaatgtacattctattgttttggggtggagggttctgtagaaatctatcaggtccacttgatccagagttgagttcaagtcctgaacatctttgttaattttctgtctcagtgatctggctaatattgacattggggtgttcaagtctcccacaattattatgtgggagtataagtctctttgtaggtctctaagaacatgttttatgaatctggatactcctttattgggtgcatatatatttagaatagttagctcttcttgtttaattgagccctttaccattatgtaattcccttctttgtcttttttgatctttgttgttttaaagtctgttttgtcagaaactagaattgcaacctctgcttttttctgctttccatttgcttggtaaatttttccccgtctctttattttgagcctatgtgtatctatgtgtattcaagtgatgggtctcttgaatacagcacactgatgggtctcaattctttatccagcttgccagtctgtgtcttttaattggggcatttagcccatttacatttaaggttaatatcgttatgtgtggattcgatcctgtcatcatgatgctagctggttattttgcacacttgtgatgtagttgcttcatagtgtcattggtctgtgtgcttcagtgtgcttttgtagtggctggtaacaattcttcttatctaccttctgaagcctacttctgtcattttcatccatctcagcctcagcccagttctgtgcccttgctggagaggtattgcaatcatatggagaagaggcagtctggttttttgagttttcagcattttttcattgattctttctcatcatcatgactttatttacctttgatctttggggctttgaggtttctgatctttggatggggctttttgtggggacttttttgttgatgctgttgtggttgttgctttctgtttgtttgcttttctttttaacagtcaggcccctcttctgtagggttgctgcagttttctcagggcccagtccaaaccctatttgcctgagtctgtcccacacctggagctgtcacccagtggaggctgcaaaacaacaaagatggctgcctgctccttcctctgggggctccatcccagagaggcactgacctgatgccagccagaatgctcctgtataaagtgtctagtgaccactgttggagggtctcacccagtcacaaggcatgggatcagggacccacttaacgaagcagtctggctgccccttggcagaggaggtgtgctgccctgaggggaatcccacttgtctggactgcccagattcctcagagccagcaggggaaagaccaagtctgctgatctatggagactgcggcagcccctttccccaggggttccatcccagtcctagggagatcaaagttctgtccataaacccctggctggagttgctgaaattcccacagggaggccctattgggtgaggagggatgggtctgagttcagcctaaagaggcagtctggccatggtctgccacaaccgctgtgctgtgctgtggggaattcctcctaggtccaaaccacccagtctccacggcaccagcagagggaaaccgcagactggagctgcagtgatggtggccgctcctcaccctggcaactcagcagtcttaggcagcctcctgccgagtggcctctgagaacctgcacagctgtgtgcttgggacccgaggccctggtggcgtgagctcacgaggggacctcctgatccatgggttgcacatatcagtgggaaaagtgtggtttcccggatggggtagcacaatcactcgccacttcccttggctgggggtgggaggtccccttgccttgggtggctcctgggtaggctgtcactccaccctgctttttctcgcccttcgtgggtcacgccaaccgcctagtcagtcccagtgagaacctggacacctcagatgctggcgcaggattcactcgctgtttttattctgcttggtgggagtctccaaccatagctgtttctagttggccatcttggccccagaaatgctctttttctagattttgggttatcagttggggccccatcttaaaaaaaaaaaaaaaaacaagtggtgctgatacttatagcagaagactttctaaaacagatttttctactttaacttgccattttcttcaggccagaaaagctgagacctcagcactttgcaggaaggaaataggtctctagtgcatcccggagacccgggggacgaagggctctatgagttcacatggtttcaatatggtgatgtcatgtggcacagcaatgtcccctgaacctatgccggattggtttttaacagtatcatcaaacagcacatctaccaggactctttaggttaaaaaaaatccagctcaaactggattagaaaaggaagaggggaattaattggctgcaggcatggcagatccaggggccccaggtgacataaggactcactctgttccatttctcactcactatgttggtttcattttctaagatgccttatactcagcagtctctctccatgcaatgacaaaaggtggccttcagcagctccaggcacacagcctcccagctcagcaccctcaccagagaaagcacagatccagcaaacaattagaggatggcttcatttaattgcattaggttatgtgaccatctctgcactcattcccatgattagatgtgaaaactattcttagaactagcctgtgggtctgcaccatccttaccacatggtctgagagtagggaaggggtgaggtccccaaacaaaatgatgacagcacacctggaagaaggggaatgcttgctgggcagtgaagaggtgtctttcacattaaggctgagaaatggaaaattaatcggtgatccaagtgaggctcaagaggaaattctccctactgcctattcaattggaattcccctgaggttggtgctcaatgaaactttgttaaatatgttaaatgaaataattgttcaagaaagcagaagatagcaaactgtcatctgtaaggcaaaattgcaaactactggagatcggtacagtggctgactcccttccacctgactggtttgaaaatcaaatgatttgacacatgggctccttggagagatgaggcgccacagcgtttgggcagagttaggcaaggttcccacaagatctgctgcaacccaacactgaaaacccagaatgatccagccttgctccccgtcctgatgtctgccggcactgctgggcagaggaagggctcctgtgttataggcagctcccccacaggcccctgggttgtcctgacaaaggagaggatggcaccagtcgcagaagctgcctgccaactctcacagttgttctgggcagataactccgtcctgacaagcctgacttgccctagagtctctccaaagcaagggctgtggctgcaggagggagggacatggctgctctggacaccctcagggtattgttcttacgtgatctgtggacaagcagatttggtcctttaaactctgcctttacctgtgggctgctatttcccatccacaacccttcttcaccactgtggttccacttaggtgactgcagacctaaagccctactgggagcattgcattttccagctttcctctttcagtctgtaattgtcttaaataataacactaggtgcagccccgaatggatggcgtgcaggctcccaggtcactaaaaagtgggtcctaaaccatagctttctttatgccagctgtgtgtctttgggagagaggcttacatttttgttccaatctttttcgttttttgataaactttttatttcagaatagtttagatttatagaaaaactactaatacaccacagaaagctcaactgtccccattattgacaacctacatcagtatgacatatttgttataattaatcaatattgatgcattctcattaactaaggtccaaacctcatgtggagttccttattttttcctctgtgatgtcccttttctcttgcaggtgcccatccaggaccccacatgacagctagtcatcatgtctccttgagaacctcttggctgtgacagtttctctgactgtctttgtttttgataaccttgacagttttgaggagggtccggtcagggtttttgtagaatatccttcagttgggattcatccaatgtctttctcattgttagacagggaacatggggaggcctgttctattttcttttctgatggctgacatgtagtgagcatctgctctgatctagcacagtgctgatcactgctcctggatgatctcatttaatcattacaaagcaaacaccacatagatatcatgattaagcccattttacagatgtgaaaagtgaagcacagcaaggactagtacctttgctaagtcccgacagctgggaagatggacagccggtggtgttaatcggagtctagagagaaccagagatcagggatgccaaatcctcctaggatgcaggctagaatggaatcttgatcataaaaaacttgccatttatttgtggcaggtctatgagctctagttttaaattttgtcaactcctactggcttgagcaagacgtttgactcgaggcctgtagcttcctaggcctggcaacctcccaccatagaaggccctccaaggccagggagcctggacctctgtgggcaagaaggtgtagatgcagcaagcctgggcagggatggcctgatgagtcccaccccaactatgaaaggaatttgcaggagagctggaaggacagaggagttcagaatttaggtgggagtgatgtctagtgtgggcaaaaggtagcaggggaggggaagcaaggcagcctcgggccgtttcacacaaagggtgggtgagcccggccagtctgcagcagatattcagccactgcccctgccccagcccactcatcagctcgtggcttcatcatgctgtgggatcctgcaaactacatttctcctttgggtcctgacaacaggcaggaggctgcagggctcctttgtgttcgggtgtcccccagctgtgggctccaagctctacttcttccaacaccccaaagccagcctcgggggcctgtgaggctcctgtacacagtgggccgtgccctctgctctgtcctcccagcttctaggttctgatggctaacaatgaacatttactagtttagtgttgccctcaattcagtcttttttttttttgaggcagagtctcactgtcacccaggctggagtgcagtggcgtgatcacggctcactgcagcctccaccacccaggttcaagtgatcctgctgcctccacctccccagtagctgggactacacacagtctcacaccaccatgcctggctaatttttgtattttttgtagagatgggatttcaccatgtcacccaggctaacctggaactcctgggctcaagtgatcctcccgccttggcctcccaaagtgctgggattacaggtatgagccaccacgcccagccagttcagttatttatgtaccaccctatggatggttttcaaatcctacactgcaagtcaattcattcttttaaatataaacatttaaaatttaaaggtatgtatttttaaaagacacttcatatttttattatcagtgaaaaacgaatgtcttaatttgtcttaatttttaaaaaatgcacggcaattaaacaagtgtttgtccttgtactaaaatctgtctcccaccattcacgatggagtaacagcctctgcaaaaccctggggtattcattcaaatggtatttattgaggacctatggatgcaaatgcttttgtaattgctctgaggagttttacaaaggtgacccagaccctcagccacagtaaaccaggctttcaagccttcctcccccaccgcctttccacccacaatgaccactcaaacacggagcttggaatcctttgaaatgcctggtggagctggctctgtccctgatgggtatggctggtgtgaggaactggggacatcagggagaacgcagaactgaacttgaattactcacatcacacatgagctgaaacccccagaagtttaacaggacattattcattataatttatggaaatatattagagaatttcccaatgtaactgaaaaggtctaaatgatattcaaaggagaatatttaatgacatgttagaaggtactacatttgagagctgtttgttaaagtgctcccaattttgacaaacgtttgtagaagtgtttttttttttaaatcctgagggaacagaagtaataatgtgggtaaaaactttgagtaatatttacaaatgacactgggaaaaataagaaagcatctgacgtattttctcttgtttgcataataaaatcagacatcactggcttatgtacataattatcaggactcatctttataaaaccaataaggaatgttaaatcaagaatttttgttagaattttaagttaaacagatggtaaagacttactagtgccgattcatctaataaaaaaaaatctcaggataacttcatctaatttcataaaatcaaagcaaatagagtaagtgctttaccattttcttttgagaatatatacgtgtatatgaatatatatgtgtgtgtatatgaatatatgtgtatatatgtatgtgtgtgtgtatattgcattaagtacatttacaatgctgtgaaaacataatcgctacccacttccagaacttccttatcatcctaaacagaggttctgtacccactaaacaataacccccattttctccctctcctcagccactgattatctctattctcgcttctgtctctgtgaatttgccaattttagttaccttacataagaggaatcatacaatatttgtctttttgtgtctgtcttattccacttataatatctccaaggctcatgcatgttgcagcatgtatctgcatttcattcatttttagagttgaataatattccattgtgtggctatgtcatattttgttggtctttctatctattgaagagcatttgggttgtttccacctcttgattaccgtgaataatgcagccatgaatatgggtattcaggtgcctgtttgagtccctgcttttaattttcatggttatatccctaggagcggaattgctgtgtcgtatggttattggatgtttaactttttgaggaacccttttgtcatacttttatgtcaaatgaatcctttggaaattgaatttatctgtacagttatgaggcacagtcctttttaaattttattttaaaatccagaagcatttggttacccactaatacctactgagcccctcctgattgctaggctgggttctagatgcggggactatgtagagaacaaaacacagcccttgttctcgtgcaacttatgttctaatgtgggagacagaaagcaagcatgtgaatctatgatgtcagagagtaagaaagtcctaagaggacacagaacagaagagggcgatggagagtctccctgagctcctgtcatcactgggtggctggggaaggctcctgcagggaggcattgaagcagaaacctccactgactgaggaagccatggtgggggaagctggaaggaaaacattcctagctggaggcacagcaagtgcaaaggtttggcagaatcctagagcggctggaagccttgtggctgcagccctgtgagggagggtgattagggggaagctggctggatcacagaggggctccccagctgtatcagtcagtcctcatattgctataaagaaatacctgaggccaggcacggtggctcacgcctgtaatcccagcactttggtaggctgagacaggaggatcacctgaggtcaggagttcgagactagcctggccaacatggtgaaaccccatttctactaaaaaatacaaaaattagctgggcatggtggtgcatgcctgtgatcccagctactggtggggtggggagctgaggcaggagaatcacttgaacccaggagatggaggttacagtaagctgagatcgcaccattgcactccagcctgggtgacagagggagaccctgtctcaaaaaaaaaaaaaaaaaaaaaaaaaagaaggaaagaaagaaaaatacctgagactgagtaatatgtttgtttgttttgagacggagtctcactctgtcacccaggctagagtgcagtggcacaatctcagctcactgcaacctctgcctcccgggttcaagcaattatcctgcctcagacttctgagtagctgggactacaggcacccactaccatgcccggctaattttttgtatttttagtagagaaggggtttcaccatgttagccaggatggtctcgatctcctgacctcgtgatcctccctcctggcctcccaaagtgctgggattacaggcttgagccaccatgcctggccgagactgggtaatttataagaagagaggtttcattgcctatggctccacaggctgtagaggaagcatggcagcatctgcttctgaggaggtctcagggagcttccaatcacggcggaaggcaaagtgggagcaggcgtcttacaggacaggagcaggaccaagggggtgggggaggtgctgcacacttttaaacagccagatatcaggggatctcactcatgatcagaccggcaccaagggggagattagcccccattatccagtcacttccaactaggccccagctggggattacagttcgatatgaggtttgggtggggacacagatccaaaccatatcatcagctatgtgagaactttgggtttctggttgagggcaatggcaggcccttgccaggttttgtgctgggagtgagaggatctggtttctattttgaaaggatccttctgcctgttggtgaaaatgactggggagggcagagagtggaaacagggaggcccacttgctctctgtgtgggacggcacccctgagagggcatttcttccaggcttagggagtcagtgcatgaagagcacgttgaaaccggcatttcaatctgacattgaagttgctttccaggaaattacactctttcaacgcctacattagaagggctatgtgggccgttcaccttttgccttttcaatttctcatcaaactcattgcccagtgtactcctgtcattacgcacaaatgagcacatgaggagcaaatggcatccacacctttgccagcatctcggcagctgagtcctccccacacacaaaagatgctaaagaggacgtatgggtcaagatgctcctctctaagctaggacccaggaaaaatagtctgtaaaattaagtgaatgccttctttctgtgtgcttctctcatcctgtttgaagaaaaccaaatgcgaaagaagaattaaagaagaaatctgaaagacttcccacgcggaactctgggatggtaaccaaacccaacctctaaccttaatgtgaagagtatcttgggttgtaataacaaaaacaaaacaaaaaaatttagatttttaagcactttgtttatctagttttacaaacttaggagttacatgttccttattaaaatttattggtggaggagaagaagagaatagaagaggaaaatatcaattgttccgttttgagtacatgtttctcttgattagtgaagggttatttccaaatttaatatgagatgttggtgatctgacgtttaacatttgaagttacttagagtaacttatttccccaaattcagtaatgccaagaaacacaattaagctgattaactccatggaatgggccgtctgtgctgtttaatccattttggggatggtgacctccgacaccacactttggcatcagtattgatgacttcgtacatttcctggccctctctacactggggaagtcatgtaaccacagaaatagtatttatttttcttacatgttaaatcccatcccaaatcatatgggaagagcaaaacgacagtgcaaattataatccaaacgagataaagtgacaacagtagaccaggaggtcttgaaagttaaaaggcaaataaaatcagccactcagagaaacgaagccagagcaaacacaggcaaaggtccgggaagggcaggaaagagtccagagctgaagacctggcaggcgggagggtggaggtggggttcaggggctttgccaagcaggttacctgagggtcttcattcggggaggaggctctttccatctctccacagtgtcaagtaggagtgatatttgcctgaggccaaagcgggtagtgagggctccaggtcacaaagccagtgagtcagtgacctccagagagccagggtggctcccacacccagaaaacaagatctgtcagccagcagcagctggccctgcccctgcccacaatctcagaaagcaggcatcaataaatggaccaggcaggaaaccagggcgtttaacacataaagataagcaaatcatcacacatcagcagacacttgagagaaatcaacagtggggtgcatgactccaaatgcatccaactgaagaaccaaaatgtaacgaatgggaataacccagcaaactgaagaaaatggagcaactttaggtactttggagagattcaagtatgtaaagcatcatctatgatgtaaatgaatccaccagagatctaagaagttaaaaatgggattattgaaatgctgtattaagctccatgcatgggctgagtagcagaatggatatagctaaagcttaagggattcttctagaatgcaccaacattctatgtgtaagatagatgagagaatgtaagatagataagaggcatagagaatgaatctccacgatggacatctagttaaagaattctgggaaggaagaaaagaggcaatgtggagaaggaattgaaaagaaaaaatcagtgaaaattttccagagttacaaaaagacacgtgtcatcatattgaaggtacccactgcattgggagcaggagaaataagaaaggcctgcgctggacacattgtgctgaattttcagaaaaccaaggccgagtagaatatcaaaagctcccagaaagaaaaatgaggtttcttgcaaagaaacacagttcagatcggcattagacttctcactgccagtgtcagatgttaggagatgatgtgggacttggcagttctgagggaagctggcttgcacgtaggatcttgtgttgagccgaaatcacattcaggttagagagcaaaatggaaccctgcagagatgcaaggacccaaaaagcttgccttccagagatactctgaggatgactcgagtatgtcctcaagcaccgtgagagtaaatccaaaattagtacatgtttgcaacacaattcaaataatgcaaacatgtacaaagtagaaagtgaatttcctccttttcctcccacccccaagatagccactgtttgtaacatcacagtgtagaacacattcttccagatattatgtgtgtgtgcgtgtgtgtgtgtgtagaacacacatctttacagaaagaccacattctacatgattttggcaaagctgcttttgtaactggaaattttactatggcaaacagtccagtctccttacgtgcataactcctggttcatggcaaattggttcatggtaaatttcacacaggcttctgtgccctagagggccttaatttattttaccagtcctattaacaatgtttacattgcttttatatttcactactaaacgaacactgcagtgagtatcccttggatttttatctctgcatacaagctaatatttatgcaagataaacctctagaattggaataattgctagattagaggaaatggccaattaaaaaagtgatagatcttactaactcttcctccaacataatagtaaccatttattatttattatttttatttttttaaagacgaggtctcactctgttgcccaggctggcgtgcagtggcgtgatcacaggtcactgccgcctggaactcccaggttcaagcgatcctcccaccttggcctccccagtagctacaactacaggtccatgccacgccaccgtgccaggctaatttttattttcggtagacacggtgtctcactatgttgctcaggctggtctcaaactcctggacttaagtaaccctcccacctcggcctcccaaagtgctgggattacagatgtcagccactgtgcctggcccatttattctttagatgaccgagttgggcattcagctcatccagggatgggtgtgtgtgtgtgtgtgctggggaaggggtgctggtatcggagcttctgaatcctgaaagtgtcggacggggctgaaccacagggttgagcgtcctgcctgggctgtgaagtttctcctacagatggcgctgttgcctcgcgcctgtcactcaggccgaggggcagagtggtaattctaagacaaaaagaaattaagcagcacgcaagcgggctgccgcatttttatgtttatgccgagacgacccaaatctatgtttcttcaccttcctggctgtacaactcagataactttgtgatccactcttcttcagaaggaagaaagaaaagattctatttgaccgtcttttttgaaatccttagaaatccaccctttgaacataagtctttgagaacttccatcaatgtgcatagtgagtgtgtttcaggagaagaaataatttagattttagctcagtattttgtttttcattctatttcttcttctaaaaacaaaaacaaaaacctcttgatccaaaggaaacacatggagaatggagaattccacagcagccttgcagcatgagcggctccggatggccctgcctctgggctccagacccccagtgtttggttccagggcttctgcccagtggtgatggggctgggagactagactcactgtgttgggagagcagtgggtgtctcctgggcaggagagcctcatccctgtgcgcacccacgctggggccttctaggtgtgtgtccccgagtgtgttcagtatgtctcatgtgttcaagtgacagactcgagctggtaaggacctggagtgcctttctacccaggcagaaatcaggaataaagtgtgagctgttgacaatcaggcttcccggactgtaactaccaggttcagaacatgcttggagttaggttttaaatgtaagtggtaagactgtcctctctgcccgtttgaaatgagcacaggccgtgttgcaggtctctgattcggagtaaagatgagcctggcttcctctgcggaggaggccagaagcaggtgcggagggcttagcagaggcctttgcactcagagacttgcatctcctgcatctttttaggcctggaaggcacccgcatgctcctctcggcgcaaaggttccaggaggtggtgaccttgatgaatctcagtcaagattatgaataatttaggagtaacacaacccagccagagaatgctttcccagacagcagacaggctgccgttcttccaggcgtccctaaatgggcatcagatataggaagactggtgggcacagcagcggagggcttttttcttggcattattaaaagctgacgtgcttctttgtgtgagttgcttgttccactgacatagaattgttttgttgtcactgtagctttagtgtacacataagcaaagcaagctctttaggtaccgtgaaaaagcgatggtggatatttctgtgtgtcttgagcataaattgtaagaaaaccaaacagattttaaagggtttgggggggatggcggggagatctgggtgtttgcagaagaagggactgtggctgggggttctgaacaggcactgccatatgtcccaggccacgtttagtgcacagtgattatggcaaaggtgggaacttgaaggggtgacctggtagcattatgctagaacctgagtggcagtggtcctgggctggacacaggagcctggccctagtgaaggatcttgggcagcggtcagggagcaaaggccttggggtcatggccagaggtcaagagctaagtggtatctgggagccaagaggtcaaggcaaagggcctcctgccagtgtttaatgttggccagaagcaaactcaaggcttgggaggcaggtcagcaaagcaggaaggaatgggccggggaggacccaggtaacaagaacttggtggaagcttagtgagaaagcaagtggggtggagagggagggattcatatcgcaggcatcatttcacggtcatgtgccatgtggcatggggtgcgtgggaggcctcacgtgggtttctcctgctggcaggaagggctccatcctgtgctcaaccctggggatgctggacagctttgaggaggtcacagaaccaggccagtgttcgaactcaggagccgaatgtggagcctgtgctcgtaggtgtcgctaattccactcctgcttcctgtgtcctgtaagcttaagtgacatgctccaggcagcgcttaatctagggcgtctggattcccacccaggcgtttcagacgcccaagcccagcctcctcgactcagccatgctgctatgcctctgactgtggatcccaggccaaagacagaggttctaacccccttctcccccaaggtggctaccttagttaacagctttcttgccatctgcccttcccatctccacccaccccaagtcccttcctttctacctgtggaatgtctactggtctcagcctcctcccccgagtgcctcttcccttccagctgtcatcaggaccatgtgactcctaggactcactctctgcctgccctacctgcccccaactacctctgccacctgctgctaccctcccccaatccatcctgtccatgaataccagggcctttctaaagcagtgatggaagctgaacacgccctgctggaaaggcagtgatggcttccccttatcctaactctgcagcctggatgtcacttcctctctgaatctcatggtccagctcttgtggtgggagctgcctggagctccatagaaggattcgaaggccaggtcagagcttcctggagcctagggccatgattgattagtaatgcctccagggcacaggacgggtaagcaggggtgtgtttaccatcaatctctctctctggcaacttgtggtcacttgagcatactatatggttttgggagcctgagttttgaatgtccctttcatttcataggatattttaccctctttgggtcactttgcaaactcttaattgtccttcaagactcttctctgcagaagtcaatcctttgaggttttaacagaccccacgagccgtgttatccccagttgctgctataaacccttggatatctctctgggccttcacttcatgccctgcaatcgtgaacatactcctcccccatctttccctgcctgccgtttactgtgggttcctgaaagcacggagggttttagaaattgcaaattcccagtagctggcacataatcaatattcaaaaatgagagttgagttttggaaatctacatcctttatatctgcctttaaaatcagccgaggagagcacgagtaaatggagttcttatttaactgtataaatgaattcttttacctgctcaactttcctgaaagagtaaggccaaggaattaaaatacaaagatagcaggattcagttaaggaaaagaaattaacatccaggtcgcttctgaattagctttgcttcagtttgcacatacttacaaagctcctactttgtgctggacacagtcatggattcccctgcgtgtctacccttagtgtcttggatgatgagaatcaatctcagggttccagcgagatggggatgcccaggcataggtttgagaacttaataagttcatcaacaggtggagaaatggatccaccccttcaagccttgactcgctcgtgtgcaaagtgaaggagaccaagtcactcttggctcccattcatttaccaacatgcactctttctcctcttggtaagcattttcgatggattagccccgttcatacttacaacacccttggtaagcattttcaatgggttagccccattcatacttacaacaaacccgcagggaaggcagtaggattattcccattttatagacacagaggctgaggctcaagttgtgagaggagctgctatatccactgctttttcagaagtcagcttctgaggatccaataaaatgcagcatggaaagtagctcagaaaaccacccaaagccatcgtacttcgttcactctgcgagtggctgtcagccagctttccttggtcagggatctggtccacaagtgctgaacccgaggacggagcagcgaggagcacagacaagtctgggcactgggggaccctgcagcccaatgagtcgtgtgggaaacagatgttcatcaaattcacaccagttcagctctcacgccccctctgtctatttgctgtagtatttaccacattctgccttatcatgtacttaatgctgtgcacatctgtctcctttacaagacaggaaggtttttgaaacaagggccatatgcttttcatctgtcctagtgcctcgcgtggtgctttgcagagcagtccgagtgtaatttcagaaagaatcagatgatgaatttaactccatcactgcagccatggttttcaggtacattcaggggtcgtgcagcttcttcaggaattaaatcaataccacatatattcactgagcaccgactgtgccagactctagggcatactgggaggtgagtgtcatgtcatcatccctggccctggaagagacatcaaatgctgggggtttttttgtgtgagttttgaggcattgctctttctgagcccttacataaattctcatcccaggcatccatgcaaaagcctccgattttgcacatagcacactgacagctggatcatgggtgccagattttgtagctgctaaggggaggctgctgggaggaggagcagggaggtggcagatgatgcagggagagaaggatggagctgcaccctggcttgctccctgctccagttgactggtacatttccctgcttcacggctcagccagatgcagtcacttaactctgtggtagatctcgcagcacgacaggtcgggaggatcctaggccagaccctggtctttcttcctgtgctccagataatttgccatcccgcagaactgctgggtggggctgcacaccatgctgaccagagtgagtgcatgattctgagtccaagtcatcagagtgcagccttgtctgtgacagtattgctgtgtgactttgggtaagttacttaatttccctgtgctgcaatgtctcatgtgtaaagtgggatagaagaataatcccaccttctgaggttatggaaagggtcacataaaggcatctgtgccgtgagcttaacatggtgctggcaggcatcccagggctcggctcatgctggatgctgcccttgctgttttaatcaagggctgttcaacccgctagcagcaccaaccagcccgtcaaccccacacctagcctgctctcacaactgcttggggaacttttacaagagacaaattttctgctatgcagccatgatgaaaaaggaaatagatgtccacgtgctgatgtggaacagtttccaagatacatagtgaggaagcacagtgctctgtaatgtgcagtcagcttctatttgtgtaaaatactggagagatttacacacatgcttgtatgtgctcaaaatatttctcgaaggatccacagggaacttgctacaaaaagggcctttagaaaagaaataaatgtttgggtactgggattggggggacaactttatatattgtttgaattttaccgtttttttttttgttttttttttttgagatggatttttgctcttgtcgcccaggctggagtgtaatggtacaatcttggctcactgcaacctcctggtttcaagtgattctcctgcctcagcctctcgagtagctgggattataggcacatgccaccatgcctggctaatttttgtatttttagtagagaggaagtttcgcgatgttggccaggctggtctagaactcctgacctcaggtgatccatccaccttggcctcccaaagtgctaagattgcaggcgttactgtattttatttcttaaatgacaaaagagtccatctccatctgaatacagattcctggaccctgtttctagtcttctgatctcatacttttcaagtgggatctggaaatacatgccttcatgatgtttcctaagtgttgtatatgatccactagattttggaacatctgctgtagagtgagaaggacaacctggggggctgctaatcagcaccatcccagcatgtggtgggccacaggtttgtgtttgcccgactgatgtgagttgtggaagggaaatggaggcagatgcttcaggttggctaatcctatatctgtttctaactcctttctcccttttctgtctcctcttcggagggtggaaagtgaaacacccactttctcagactcctaggagtggccatatctacacacaagtgttctgggaggctgcaggaaaagctttggctttggggagaaaaatgatatccaggggtgattggctccaggactccctgcaagcaccgaagtctgtggatgctcaagtccctgatataaaacggcgtagttttgcacataacctgtgcatatcctcctgtctgctttaaatcatctctaggctacttataatgtctaatacaatggaagtgctatgggaatagttgttataatacattgtttagggaacaatgacaagaaaaaagtctgtacctgttcagtacagacacgattattttctcaaatatttttgatctgcagttggttgaatccagggatgtggaacccacagacacgaagggccaactgtatttagatggattcctttccatttccctcttatctttaactcctccatggtgtctggagctttggcagccattttgcactcatgaagaaaagtccaagggaaattgtgaacacctcagccgtggtagcattagacccctcaaatgatgcaccagccaccttcccagacttcttgtcctgtaggtaaaagaggaacccttttttattgaggttggtcatgttttctgttatttccagctaaaaggaacctaatatatgggcactgaactagggatgtgggagacttgggttccagccctggctctgcttctgatgggctgggtggcctcaggaagatttctatccctttctgatccccagtttaacaacctataaaacatgttgaggctgggagtggtggctcatgcctgtaacctcagcactctgggaggtcaaggcgggcagatcacttgaagccaggagtttgagaccagcctgggcaacatggtaaaatgccatctctactaaaaatacaaaaattagccaggtattgtggtgtgcacctgtagtcccagctactggggaggctgaggtgggaggatcgcttgaacctgggaggcagaggctgcagtgaaccgaggttgcaccactgtactccagtcttggcaatagaactagactctgtctcaaaaaacaaacaaatgaacaaacaacaacaacaacaaacccatgttgaacattatacctcataatgatgatgctgaacattttttaatatgccagttggacatttgaatgtcttcttttgagaaatgtctattcagaatttttgtccattttaaattggacttttttttttttttttgctattgagttgacttccttattagatattttggatattagcttcttatcagatacatagtttgcaaatattttctcacatgcataggctgtctctccattctgttgatcgtttcttttgttgtacagagctttttagttggatgtaatcccatttgcctgcctttggttttgtttcctgtgctgtgagctctaatccaaaaaaatccttgctcaggccaatgtcatcaagcatttcgtggatgttttcttctagtagtctatggttttgggtcttacaacacctaaatctttaatccattttgggtgatttttgtatagggtgacagataggggtccaatttcatgctgcatgtgactagccagtttttctggtaccgtgtattaaagagactgttctttccccagtgggtgttctcagtacctttttgaaaggccacttagctctgagcgcatggagttatttctgtgttctctgccctgttccaccggtgtatgtgtgtgtttttactcctcggtcttcaagattgttgagagtttggagcctgggtgcaccagcttctttgtatctcactgtcttcctccccaaacccagtgcccagcatatagcctggcatgcatgaaaggctcagccaattgtttgggtttgatatacatgttaatattgggagattgctgcatacacttaagtgccgatgtttcaagctggggaggcagaagtctggggaaaacaacaggttggaacttcattgcgactcggaacatgtctggctggcatatgaatccatctgccatgacggcttggataaaaatagtccacattggaggcttcattctatttgaatgtacagattaaccagtactatgacaactattttcagaaagcagcttgctgaaactttgtaatgatgtgtttaggcttcacagcttcaaaacatgatcttctaggtgaaagatggtaaatagcttcaaagaaaggtattcccctccctttcctgcccttggaaaacataactatatgatgaataaaaatgactctggacctgtccataccacccatgaaatgttccacttcttgagtattttatgtaaccgtgtcagcctggcacagtgcattaacaccaagagtttcttgtgatgttttctggctgataatattttccttacaagttccctatgaaatctaaagcaataacaacaaaacagggcacttctacgctcttaaaaatgtcattgtcctattttttaattaggcaggatgtccctgatttcccaggggagtcgatgggacgcagtgttttacagcttatcatttggacaccttaagtctgaagattgggtccaggtaacagggccaacaagaaactcctgcaccagggaggtcagggacacaggccaggaacgctggctcaggcatggtggctgcagctccttggtcacaggatcttgggcatccatctctggccagtttccccatcagtaaaacacgaatgctggaccagataagggtttcccaactcagcactactgacgacttgggaaggatgactctttgttgagaggggctgtcctgtgccaattaagatgtttagcaacactcctaaccactactacccactagatgctagtagcaacccccagttgggataaccgaaaatgtcttcaacattgccaaatgcccctggaaggagagggaaaaatgacctgcggttgatgacctcctcgctgtggctgacgtgctttggtgatgcatatggaggagatgattcagagtgttcacactgtgcgtttccacttcttatggctcctaattactcccagtggctctggagtggctccccaccctatgtgcacgttccttctgaaagcctgggacaaactttacagttttatatgtttactcaactttacagttttatatgttttgttcacgtataactcacatgcagaaaagtgcacgtcaaaagtttacatctcaacgacttttcacaaagtgagcaatccatgtggatgtagccagcacctaagccaagctgcaggacgggagccacgccctctccttcttctcctcttccccctagttagccactatcctgactttggaaccgtagattagttttgtctggtttgttgaacttgatacaatggagtcatcctgtatgtgctatttatgtgcctggcttctttcactgtacattacgttcgtgagattcattcatgctctgtgcacttgcagcccattcactctcagcgtggatggtattcattatctgactgtgcggccactgaatcttccatgccactggggaggggccttcggggcatctacaggctggggattataaattgcactgctgagaacatttgtgtgcatgtcttttcatgaatatgtgaatgcatttctgttgagtatatactgaagagtggagttgacaggtcacagggcatgtacatattcagttttaggggctgccagatacttctggaaattaataagaaaaagactgaaaaccctatagaaaaatcagtaaaagagttgaacggtcacatcgcgaaagaagatgctcagttgtccaataaacatggaatggtggtgcttaaccactttagtcatctaggaaatacacatcaaaaccaggccatactactgcatctccatcagtggctataaagaaggacaagttgaaaaggacatggagcaaccagaagttctgtatgctgatggtgggagtggaaatcagtgcaaccactttggaaaactggcaatatcttctttgaggtttgtaagccacagaaaggcacaggtaaaaacgaacatttatgatttggaacaactaggttttatataagatacaaaaattaaacaaaggatttgtgcattgcaaaaagctacaaggaggtccaaagcaggaagttatgcaaaacatagcatttgcccctgactgggagtgcagggaagatgtggaagagcagagaggaagagaaggaggctagggttaggtacctactcaagaaggttgaagggaattgtggaaggagaggggccggtgtcctgctcctgctgtcaaactctagaaccttgtggggctgctgtgatcccacagagaacgtgaagagggctcccagttccctatggccagtgccaagctgcaagtacattagggagtatctccaaggcttgtgggtggggtaggaagtgaaagactaagagatcaggggccaggaccttttcaagactggtgaggaggatgcagggaggccgtggcagggaccacaggcagatgccttgccaaggaatgcccaccagccagagagatggagtctagcacctgcagacacatgcagagaccggaggggcagggggctgatggatcaccaccctcctctgccagttcacccccagacagggagaaggagctagagagtaaagcaatgtaagatgatttgcccaaacgtgactagtgagtaagataaaaaaaaaaaattcacatttgactaaaaatttggtggattaaactgaataggtccataggtgacagcttaagtgttcttctctaggaagactgggggattgagataaaagctcagtcaattatagcaggcaaagaaaaattcactgagagcagtcaggccactggctgtgaattgcccacgtctcccttctacctgcagctcccaactgcaacacagacggtgttcccttcttccctccctgctttccttctttataacaaagacaaccatgagctatggactggagacccagcgggcaagaacacgaacactgctctctcctttacttctctctccagtctaatgggagaaacagcacaaaagagaatgactacctacacagaatacttttactgttgtgtgtgatgagtgatgctttaggtggttgttacaaagaaggcatctctgagaagcttggaaaggatgaggaggaggcaattgttccaagatagtgaacacccgggagcaagctccaaggagtgggagtggcctgtgcaaaggccctggggcagggcatgagtaggattttccagggagtaaaggaagttgattgtggctcagtgctctgaaaggatcatgggccggggcacagactgtgcagcccagagggagggattttggagaaataatggaaaaaccattgcagggatttcagcaacaggaaaagcaacctaatttatgtgataggctcattcttcttgctgtgatatagagaatgtattagaggagaagagtggaagtgaggggccatttggaggtggtgccagagcctggaaataatggtggcctagactaagctgatggcatggagagaatgtgcatggatttaagatctcttagaagcagaaatataataaccataacatacactattattattataaccaccacttcctgataacctactctgtgctgggcagtgtgcttatagtctcatatataatattcaatttaaccccatgcggtagatactgtctttatcatccatgttttgtagatgaaaaaatggagcttcctaaaaattacattgatacagggcaggggagccccaaattggggcttagaccaaaagggttctttgcttcacccaggaaagaatttgagggtaagctggtggtagaagaaaatgctttattgagatggcagtgttacagccccgtgactgctcccacagaacaggccaccccataggcggtgtgctgagagtagcaggccagggcagttctgcagtcgtatttatacccactttttaatttaaatttaatttaatttaagtttttgagacagagtctcgttctgttgcccagactggagtgcagtggtgcgatctcagggtcatagatagtttttgtaaatgctaaagtaatattcaaatttgtattactttcagagaataaagaaccaccagtcctaacagccctagtacagttttttcttttctttttttttctggagataagacttcaggaacaggaatggaaatgtcctttcagagaatctcatgtctagaaagtcccagagagggtcgaacctgaagttctttttccctgaaaccagaaggaaaacctcagcttgggcttagggcctgttctgcctctggaaacatctctgttctcccatatattatattccccactatgtgatggcccctcacattagtcaggagtgcctagaacgtgtgtccctcaccgccttcccagggggtctgccccccagaatgcctggcttcactttctacctcttttgcagagcttgccttggcaaaaccatccccaacacctctccttccacaactcccgtccaccccattctcctctcctgctttgcccatgatgataatcactaacatttattaagcggttactctttatcgagagttttgaaagtgctgccttgttgggccctgccagcctccccaacaagtaggagttgtcctatacattctgcttacacatatggaaactgaggtttagagaggtttcaggaacttgaccaagtcagtcatgctggtgaaaggtagcctgggattccagcctccatccctttgaacagctgtgtctctgtttctccatctcctccttgaggtcagggcctcattgtctcagtaacttcagcgctagcagagtgctgggtgtgcgggcacccagtacacatttgctgagttgaactgagtgctagagaatgtttgagtgcattggaatgtttgagctgggccagatgcaaacccaaggtgtcccattgtcacaaccagacacggcggctgtacccaggtatgacaaaatgctgctgctgcagctgatggcaggaaatcatgatggaacacctattttgtgtcagacgctgtggaaagcaattcacaaagtcatcttctatggcctgaacgtgatctccccaaatttatattttgaatcctaatctctaatgtaattgggattagtgactttattttaaaaaggccctggagagactcttcagcccttctaccacttgagagcatagcaagaagacagccgtctaggaaccaggaagccggacctcactagacattgaatgtgtggcatctgagtcttggacttccagcccccacaactgtgagaaatgcatattttattttattttgttttgttttattattattattttttgagacggggactctgtctgtcactcagcctggagtgcagtgacacaatcatagttcactgcagcctcaacctctcaggctcaagcggtcctcccttttcggcctcccaaaattctgggattataggcgtaagtcaccatgttcatccaagaaataaattttgtgttgtttatttggactaagatatcatcttattttatcctatgaaggatctgttgtaagcttcagttaagtgactggcctggccgatggagaccaaacctggccatgggacttgggagatgtaaccatcagcatcacttgcccccaaggaccaccagagggcagatgagaggcaggggaggactcaccctcagagccccaggaggaaccaacctggctgacatcttgattttggaattctggcctccagaactgggagagaatatatttctgttgttttaagatgcccagttgatggtattttgtgaaggcacctctaggaaatgaacacagaagctcaggcaggcccgactctcagttcattggcctcctagtaggggaggcctatagagcgtctgtcgggctcacggcaaatgacccccagttaacattacggtctccccacattataaccatggcgtggccttttctgctgatagttagtctaggcagaggtcttccctcgagatattctgtctgctgaaaggaaggaggatctgggaattcttccaccatgacatgagacatatttagcttcattgcaaacctgaggttttatcctttgggaacatgaggtagtacctgtgtgtggaggtgcgagggggagtggggcagcctggagaaccacctgtgtctttgcatttcctgggggagaaggcctaggcttgggggttcagctgggtctttggctaaacagtatgatggaggaggacaagggtgtcagtgtcagccaggcccactctgagtcctggctgctgggccgagggcaagctatctaatgttgctcagcctcagtctttgcgcctgggaagtgggcctggagttcaggcagttaaagcacttaacacagagcctagaatagggaagcaaaacaaaacatacatatatacgtatgtgtgtgtatgtatatggtataagtgtttattaaaattcactttaattataaaagttacactgtttatatcatcccaaagatttaaatttttgaaaggagatcatataaaaagaaaagaaagaaaaagaaaaaaagtacatataaaacaaattagaaataaacatatagaagtacagtcagccctctgtaatccacagatactgcattgaggattccatcaccctcagatcaaatatattagaaaaaagtagcaaatataacaattaaaaatgatacaaataaaaagcaataaaatgtaacaatcattcacatagcatttacattggattaggtattataagtaatttagagatgatttaagctgtatgggaggatgtgcataggttatatgcaaatattatgctagttcgtctgcagaaggtcctggaaccaatccccttggataccaggagacgactgtaaacagaaagaatatttagtgtatagtttttgcatattctctctttgctgatacatctctttacttaaaagttggactttattatacaaaatgttttcgaacccttttcctttaacaatatatggtgaatgcttttccatgtggttaaatgttcatcttcaatattctatttaatggctcattgtgttctgtgtaagaattttcgtggggctttgaatggcacctacagacacgggaagaaatagggttttgtgatgacaaaatgtgaggaaattgtgtacacagagatgggacaggaagcagactgcttgcaaactcccagaggcttctgtgagacgtgcggctgtgggggcacccactcttctccaaaggggctcttccggttcacaaccccagcacggccttcccggcagaatactggcagattacacattttgccaatctgaatgtgtgggaattctatcctactgttttcatttgcgtttcctttattactcaagaagttgaacatattttccatttgctcctcccatttcctcttctacaatttgtcaattttttttatcggtttgaatggatttcttttattattttataggactactttataaactctagataagatttccttgccagttacatgccttgcaaagacattgttttgtcagactggaatttatcatttaatgtggtttatagtgtctcttgtcaaagaaaaatttactgtttaaaatagttaaagttgtcaatattttcttttttttgaaacagggtctcactctgttgtccaggctggttgcagtggtatgatcacagcttatggcagcttcaatcataagggctcaagcaatcctccggccttagcctcctgagtagctgggactacaggcatgaccatcgtgtccagctaatttttttttttcttttggtagaaatggggtctggctgtgttgcccaggctggtctcgaactcctgggctcaagcagtcctcctgccttgggctcccaaagtgctgggattacaggtgtgagccactgtgtctggcccctttctttattggtgtcttatatactttggatgtcttaagaagtacatatctactgcaacactgtggagacactcccccatgttataccttagtaatacactggtaagcactcatactgagtagctctgtgacttggggaaagatctctctctggactgagatttcttggtttataaaatgggggtaataaaggtacctgctttgttaagttgtttggcaggttaacagagttaacctatgtcaagtccttaaaagtgcctggcgcctgacattcactcaagaaaagttagacgattatcattgtcctaagagtcttagttttccttctagtatttttgccttaaaattcatctggagtttgtacataaggtatggatttaatgtaattgtttccctatgactagcttactgccccagcatcaggtattgaacgatccatgtattcaccacagttttcaaggctacttctattccatatcagggttccagatatcaatttctgtgctaccctgttccaaggtcctaatttttttatccccaggacaaaaatgcatgtttaatttcatatagacttaatagccgataaccgagtggtcagtactcccttgtacatttttctccaaaactgtcttaatcattcttcatgtaacttacctatgtggattacaggagctgctcgtcaacttccctgaaaaccccgagaccaacactcaaccactgaactctctctcctagacacaccacattaggacatttgtttacctgccattttgtttgtttaataaggttttatttcggaaaatgctcagtttgatgaacttttgtatgtgtcttcactggcaccagggacaggtcttttctgtgtcggtggctcaggtgtcttgggctgtgttatgagagtagcttgactggtccttttcacagggttcctggagctcactggaaccagagaacttcaaaactcaggtactcagagataatccttgcatttctgagcatgctggggacttcctcacaggacaggctgtctgtggctttggtgacaagatcaggctgttgggtaagctctttctgggcttgccccaacgtgtctgccgaatttctggcatgtttctgcttttcatcttctcatcttcctcttttttggtgacattacagctctgattttaactgcatttaggtggatagattctatctcaaaatttctgtcttctaactttagtattttaccaatttatatctactgtgattactgagtttagttctactatgttattttgtggtttttatttattgtctttttaaaaatattttttctcctctttttagtcttccattacagactgaataattattcaaagttcatttattccctgatttctctgtattggtatgaaaagtccacattttattacaattatttttatggccaacttgaaatttataacatgcacacttgatttaatgaattatagagctaatgaacatttttatcatttttatcctcccccaagcaacatgaaggcatttaaacttttttttttttttttttgagatggagtctcgctctgttgcccaggctggagtacagtggtgtgatctccactcactgcagcctctgcctcccaggttcaagccattctcctgcctcagcctcccaagtagctgggattacaggtgtccgccacccctgcccagctaattttttttttttttttttagtagagatggtgtttcatggccaggctggcctcaaactcttgacctcaggtgattcacccgccttggcctcccaaagtgctgggattacaggcatgagccactgcacctggccctaaacttttaaatttgattactcattctattttctaagatatattattttagtattacactttcaccatatttttagcctctgttaattagtaattatcaatatcatttttataatcaatgaaaattaaattccccacgtgtttactgatagtgggattgcagctatctcttgactctcactctttgatacttgtttcttattagtcaaaaacttcttttaatagttctttcactttgggtctgtgagtggtgaatttttcagtctttgtctgaaaatgtcttaatttttgccttcactcttaaacaacagcttattttaatatcaagttttagatttttttctcatagtccataaaggtattgttccattgttatgtggtccttattattactgagaagttgattgctgttctcattattgttcctttgtagagaactatgtccttctggctgcttcgaaggttttctctttgtctttggtaatcttcatctcactgggacacatctaggaatgagtatatatttcatatgttttcaacagaggatttatttgtatcctcaattttgaaaaactcaaaatgattttgttttgaagattacctttcttccatctctgttatcttctcctgcaacttattttgactatacattggccttctcattctgttgtttgttttgaaattcttgccacgacttccatctttcaaatttctgttgcatgactagtgatttattcagctctgctctccagctatgtctaatatctgttgagttttagatattagtgactgtatttttcatttctagatttttaaaatttaaatccaccatttctttctttcatagtattttgttctttcataatggagtatcttaattctttactccctgtaattcttcaatttttccaagttcttggatagatcggttatctttgttgtgtatgctggttctctgttacaatgcagcttttcttcatctaggttagaatttttaattttcattttatcttcagctgatgaggctatgtattgtgacagttttatgtaactttggttacaaaaactcatccctacagaccaattttcctcagcctgaatgcaaatgttatgttcattttggtttggaatttctgccccgtagatgaagtgcaaacttgaactctgtattctggatggtgtagacttgggttagaatttctagcgaggcttggcttctttattcagagccaagcagtgccgggtctcttgctgtttacctgtgctggtggaagttcacttgcttgagtgatatgtatgaggaagttcaaggcttcatttcaggttgcccttcaattacatactcctcccacaaacagctcataagtatgattttgcagttttcttgttaaccctaaatgagtggttgtccttctggctgcttcgaaggttttctctttgtctttggtaatcttcatctcactgggacgcatctaggaatgggtatatatttcatgtgttttcaacagaggatttatttgtatcctcaattttgaaaaattcaaaatgatttcattttgaagattgcctttcttccatctctgttatcttctcctgtaacttgttttgactatacattggacttctcattctgttgtttatgttttgaaattcttctgtttatgttttgaaattcaactgagggctattttgccccccaggagacattttgtaatgtctggagacatttttggttatcctcaccaaaaatggagagggtgctaatgacaactagtgggtgcaggctgagcactgctgaacatcctacaatgcctaggatacccctccccccaaccacacacaccacccaaagagtgacctgccgtggcatgtcaattgtgcaaggctgagcagccctgctctagaccagaagcccactgaggacagggacttggtcatactggtgcaactctgtatcctctttgcccattttactgcttggtaactagtagttactcagtaaattttgcaatgtatcaaacaagcattaaccttcaaagccattattgccaatgtgacaggttgaatatagtatcttgttttaatttttatttactgaattactggagaggcaaaggtttctggtttttacatgtttattgatcatgatcacctatatttcttcttttgtgaaccaacccttttttcctttgcttacatgaatgtactaatgcctattcaactctctgttaatatagttggggttatgaatagtaatgagattatttgaggaaaaaaacccatggatagtatataacactggacaaatagagaccttattatcattttatgctgcccaagcagcctgcccttaggaaaaagtccaaggtgctttatacaggctgctcactgcacaagagggcaaggggagcgccaaaatccacccagcactctgccctctcagatgccaaacggtcaccaggttggtgtgcctggagcagagcctcctatctctgtttgcatttgcccttcaacggtgtgatagcttgagcatatcttggtacttttcaaaatgcattcatacatgtggtttattttggtccttacataaccctgtaagaatgcttggggttgctctttctggcaggtgaggatccaagctggttgcacctcagagacgctggcagtttcagagggcagatacttggatgctgcttctgcacccctgcactgtgtctcttcccaagggcctagcattaaaggagtctcggggggaacctctgctgggtgagcctcctttcagcacgcagaacctaagcttcacatggaccgatgggactgcatttgtgaaaggagaggacctttattctcaaagagatcaacctcgcctgaatgtaagcaggtcttggggaactcctgtggttctctcttttcaaggttttccatgagacacagtccagcaacacaagaggtaaccatatctacatgaccctcggaacctttgggagtgatggatgcctaagaatctcatgaaaactgtggaccaggaaaatatacctgctttcaggggcttcagggtccctggagagtctgttcaggcctctctgggctccaggagtccttggttaaaagctgcaacttatacaaaatttgattttcatggtcatgtcaagggatgccagaaatcaacgtaaaattacccaggtggcttgagtgcctgcagataccaagttctgtgctcttcccacttctgcatctttgcatctttgcacatgctgtgcctttcaagggaaatgcacctgcctgttttgaagactcgtattgacagctcagatgtcactgtctctatcacggatctccctgggggcagggttgagcatcactttccaattcccacagcccttccttcacatccttttcactgtactcagagttctagttatttgcttatatatttgtttttccaagtagaccgtgagatgcttactagcaggaatcatgtcttagttttcttgacttgcctttgttagccctgtttgcagcctggaatatagttacataacaagtgttgcaaaaatggcaaagtgcaataaagcatggggttttcatcaattaaaagggtgtaggagataggagattcgtacaagtgacccttatgtctacgtattgggacaagattatatgtacctgttgggcaggtatccagtgcctagtcagcacagatgatttgtgactcttcttaaaaaaatcatttcctccaaatactgtagacttctctcaaatcaaactctacaaactctaattcaagaagcaccagccaacctgttccctgacagatgggtgtggcttgagcttgggcaatgtcagcttctgtaggcgcccacatgggacaaatggcccatgtctgggacagtgcccagcatctggagctatgttggccctttgaagattcatctcaatgtccctgaactgctggggaggaaacagcaatggtgttaagttgtctggtatgaattactgctgcaaataaatctgacaaaccaacggtcatggtgagaagaattgcctcagacacacactgtcagcctgctgggttaacctccatctttaagtgggaggaaaaacaagcataactatctctaagaacagaaggaaaaaatccttcactggaggtctctgtccaaacgctatgactcaatggttctatccagacttatcaccctggggaacctggagagatccatttcctgtgagagagaaagagaactgaattccagccattccttccccaccacctccttctcttcttccttactggcaccattcatctatatgatagtgtagccttttcttgctcatctttctttcccatgccatacaatattctctaaaacatttgttcatagctgcatagcatgccttcaaatggtggtgccctaatttggataccactcctttattcttgggctcctaagtttttttctcaatattcaccattgtaactatcacatctctgacatccttgttcttaatttgccttcatctgagattatttttcgggatactttcctgcaagtttgctatataagtaacatcaaattactctccatggtgaaatctactaatttatgctccctggcccgatgggttttccattccacctttccttgatcaccaaacatcattacagctttcaaaatatctcccaagcttctaagtgagaaatggaatgttgctatagaattctttccatttctggtaacttcaaacatttgtatcttctttcgtgattacctaatcacatcttttaaccatctttttattgaggtgcttctcactttcttatttagaagatctctttgggtattaataatattatgcacatataatgcagatagtttctccaagttattacttcccatttgaccctgcaatcactcatactcatggattctattttggtgcaagccgccagtagggatccaactttgttttattataaatgatctcacatctgttgaattaaccacttcgtgttaattttaaaaataattttactattattttaactgacatattataattatatacagttgtggagtacaatttgatgtttgggtatacgtatacaacataggctgattcaatcaaccaaattaacatacccgtcaccttgtgccattcatttttaatgtcattcttatcacacacaattcatgggtttgcttctaagttttgaatctgtcctggtgatatttgtgattatttctggataataagagactattttaacttactgttcatattttgttaagacaatccacctctgcgcttcccctccctccctttctccttctcttgttttatccctccttccctttctctctctctctctcataactttttggctgactttatccactttttcatcttgaaaaactttaaaatcatattgttaagattcaaaaagccttacataagaactttcattggaatttcactaaatttaaagtttgatatttttacgacatcagaccttctcacttaagactatgatgccctctccatttcttcattgtcttttatatttctcagtacagtgctataatatttttatgaagtcctgtacgtttctttttgagattagcctgaggtatgttacgtttttgtggccattatccctggaatctttattttatttttttaactggttattgtgggtaaagacacgcattgattttctatttattaataggtgatttaatgagcccttgttacgtatctcagtagctcttctgttttccaggtagacttttttctgtatggtagtaataatcatcatctctatttttctaacagatcattttaggatgcttaattacttttgatagaacaatgacaaatacaaagcttatggggattcttacctttatatagacaataatggtatgcttcaagtggtactgcctaaagatagatagtctttaccatgacagcaactttcttctgatttgagtttattaggaaaatgtgtcagaaaagaatgttgaatattatcagatgcctttctatgcctacatccatgtagaaggtgatgacaggattttcccatgtaacctctaataagatgcattattctagttatataagtacttctgtcagtattccttttatctttaacttttctttatcactttatgctggagtgtcttttagacatatataattggatatatatgtacctgtaggagatattttatcatttgatagaaagtttaacacatttacatttttgttgcaatggatatgatatacttgatcttcttcttgtcattctatttccgtattctgtatttatgcctctttttttctttgctgtatggattatattgcctttaatcatttcttagtaatcttgaagacatatgtccatttttatggccatgaatagttacctttaagtgttaagaaaacacctaaacttctgtttatctgtagttatcagtataaagaagaataaatatccattgtatccccttcacataatacaagggacacacagttaagaatgttttggctaaacaaacaaacaacaacaacaacaaaaacaaagctgtgctcaatgtatcttaaataattaaaggcttatttctctaaaatgacaagaaatctgaacatagtcagttcttggcattggtttagtagatcaacaatataagagtcaacatctttgcaaatctcttcctcgtggtaataaaatggctgctccagttccagacatcatattgacattcaaggcagtaagaataagggaagatctgtgccagccatctctatcccaggacccaatacctagaagacttcacttaacatctcattggccagaactctggcacatgcccctccccacaaacacagagggcactcagagagggagcatctcttctgcctggatggtataggtgaaaagaaaggtgtgccagcctcaggagaattagcacctgtgagctcttcccacttcaatgtcctctgtagggactttcctacaaaataaatattttcctttacaaattatagcattgcattatcagttaaactgaaggataatatagcattttcccagtgcatagtaggtagttcaaaaacattagtcaaaccattttttcagcttattcatgaatcacctacctttgaatggctctgcttaaattgccaaattctgtatcttttattatgtgatctcattttttatctgcattccattccaacatgattgcctttttctattccaagtaataacaaaatacattttctttcaaataatttgtattgagttatctatgaaaaaagctccttcaatgaaaaatagacataaatgctgtcacagcatcaggaataagtaagcagatatctacctgtatggtattgctctctgatgttctaatgcttttgtatttagatacttgatctgtagtttagttaactcatttatggctttagagaatttctggtttagtacagagatgtcaggggaattccggttgcagagtgttgactgagatggtctttctgctttcctcataccacttacagtatgactacttgtataatgaaatatgctttcttcaaggctggatgtttccctgcaaagcctggcatgcttagatttatttgtgttggaaagtttatgcaattatatacacagttgtaacttaaatagacatgaatccactgaagttagttttagaaactatccaaaattaatgcatttttgtggtgctttagaaagtacttaaaattcaggctctttgggttcaaaccctgggtcttccaccataagatatatagcttgagctaggcagtcattctttttgggccttattttataaaatttataaattttgataaattcaattacaaaatcaagttggtatattacaggattattgtgaagattaggagtcatatgaaagggctcagaatactgaatgaatattttaacttaccaagtcattttaaccttggtaagtgtcttctttcttggtaaatcttcaactcaagttcggatgaacaggaaaaatgaaagctttagctctggggaaattctatcatgctcagctctgctcctcaagcactgcagcaggaactctgtttcttttcattgcatgctgtccaggtgcatttgtaccaaataaaatggtcatggtgcccctcatagccattgtcttgcagctggtagagcacttcctaaaagaccaggtgtaaggaacagcgtgggtatcttgtgtgcctggtgaggagtgcctatgagatctgggatggacactacccaagaacagcccaacctgagtggactggcatgatgggttctgctcagcagggagtgggaacctaaatatcagatggggtcaccccgcctcttgagttcttgacaaaattatctcaagaacagataagaaacctgatgccctccccctatctccaccagttcccgggggctgccagttcttgactccagcctccagcctccagcttctacccagttgacagtttttgcggccctgcagcattcctgcctatgctgctcaggtttgtatcacttgggcctgggtgtatgactcagtctctttcctcaacgatcacaacataacttcttccaggctgtcatgaaggcaacttcttcacaattcagtgtcctggctctctgcagctgagtacaaactatacaagatatagtggccgaaagcatcaacaactgttaatgttgctcatgaatctccaagatgcttcactcatatggctggagaattgaggctgggaggtcagacagggctattagtcagggccttgattcctcttcaggcagatgtctcctctctgtggggctgcttaggctccctaacagcatgggggctgacttctaagaacggagattccaagacacagaaagcagaagtgccaagtgtcggaagtctagacgtggactcagaagccagcagagccaacatcacctgctctttattctgctggctgggcagccagagagcctgcacaggttcatgggggaccctcactctcagcaggtcgcaaatgaacttgacatcatcgctagtttgctacatttaggaagtcacggggagattttacagctctgcatcctgacagctgccaactgaatgtcagacattctgagtctcagaagtccctcagtgaaccatcctgtctgtgtggccatccctggccctctcttttctcccattttcagcccattgctcctctgtctctctcacctctgtgtttctgttcccttctcatgcacagcaatttcatgaccattttcactccttcatgttcattcaccaaatttcagggtctcacctacccgtgtggctttgtaagatattttttctaaacaaagacatatttctccttaagaaaagatagttaccagctcttggaataacatttttttactaccttgctacaaagaacatgtaattaactaagttaatcaaactgaatcatgacctgatatcccctaggtcctatgctaaggtctgaatgtttgcattccccgaaaaattgcatgttgaaacctacccgccaatgtgatggtatttggtggtggggcctctgggaggtgattaggaattagtgccttcttaaaagaggtcccagatagcccccttgtacctgccaccatgtgaggttacagagaggaggcaagtctgtgagccagaagccagggccctcaccagacgctgcttctgccacagctctgatagtgcgtggccagcttgcagcctgggagaaatgactttctgttggttatgagccacccaggctatggtgcagcctgggtggacaacgatgattctgcactgctctgcccttcctctctatcaatcctccccacatcctctctgctccagacgtgcctggcctctctgtcttcctccaggactccaggcacacgccactccgcccctgcatgaccacaaggccccacctctccctttcttcttgattttgttttaataccaactcattgccgaggctgttgctggacatttaacatggttttaccccacctggggactctgtctctcctgtgcgcagttgtatttgatccccagcctttgttaccatacagcgtgctggtggtgctttgattcagtggcgctgtctgtttcctgtgtgagcaggggctttgcctgctttgacagcatcttcagcacctggaacagtgcctggtgcacagtgggtgctcactaaatattcagagggtgagtcttacaggaatgaacaaaaatatattgggaattggccagtaagggttgcaaaggcaaatgtggtgaactatggctccggcttgcctgggactgaggcatttccaaggatgcaggacttcaaatgttaaacccaggaaagtctcaggcaaaccaggacaagtgggtcgccctaatgagaacccccaaatgtcctcagagaaatcagggtgctgtagcaatgacagcggggtctggagggaaagcctgagggtggttgtcccgtcttgcatttggtctggacagatctaggcttcaattcatagccacctgcatccttgccacgacttaaggctgatcacacagcccagcatcacagtctaacaatgaaggatgtggcaggttgttgtcttggaggaaggacctgatttccaatttatctgagctgcttggagcccatgctgctttacagcattgttcagaactgacgaggactctgtcaactctcttttctctctcttcctaagcactctgcagtgatatcttcaagcccctggcttcgcagggtgcagcacacatcacagactcctaacaaaatgcaaaacacagagcaggcatggcagctacacgaaaggagcgcctcgttcgaggactgcccaccatgcggggctgcagtcacagcaccgcccctgctctctgaacctggcagcagcaagaaaacatgacgtcctgtcctggctcacctctgatcagagttggggggatctgaccgagtcctcttgttctgttgggcagagacgtagggaacaaacctaagtaaacttgaatggaaactgcgaaactgcagagagatgacatgtgcaaagcaagcctcttgaagacttgtgagcagggaagaccctggcacctttttgaactgcttggcttaggaagatttgctttgccacagcttctgtcagagcagagcaggctcctgtattgcctgctggacctgtgccttttgggccgtgcaatttggttccacaatccagaggcagattttcagaccatgcaataaaacaaagcgacatcatcaatgccaagccctggtctgccctgagccatggcagcgtttccgctgagcgagctgccttccaaggaggatgctctctgctgtgcagtgcttacatctgctgtcaccagccggctcaggggtgacaaccagtcacactccagtgacttcctcccatgtccctccaaacatctttggagtgaaagggagtctccaattatatgctttctttttcctttccaaaccaagacgatgttcagtaattaatggcatattttgaatatgccagggagatgtgcatttttctccaaggaagagtgaaacagcagcacatgtaaatacaaacctgaagccggggctccttccacaccagcagtcggtagacttgccataaaggagtggagattattttgccctgctgagaacgatcctttttgttcaagggggagaaaagtttttgacagtaggtgctgctgcagaggcatctcggcaagtcctttattaaaatttatttctcgtcttttattaacgagatttggttcggggagactatcttgtggaataattaaacccctgcctttcaagccagttttcagcagtgggctgggatttggcgatgggtgactcagcagcaaagaggacaggaaacagtcaagagacaaacagtgcagatgtgtgccggggtccacatttcccctgtgggtggtccctgccccagcatctctacgttgtcccagctaagaatatggtctttggagtcctactaatgtggatttaaatctgatctccaccccttcctcctgtgtgaccttgagaaagcctcagtttttccatctgtaaaatgaagaaattgttacgggggaatcaaatgagataatccttgcagaatccagcacacagccacctacacatggtaagtctcagcgcagacatcctttcaagttgtgttgctgatagataaagtctctctgagatccgccgatctgcagtcttctgaggccatggcttgaccatgctgcccttctactgtagaatgaatgttttcctgcagatccaagctctcactatgtttaatcaaatttaacccatagaatattcacagcaacattattcataataatgcaaaagtggaaacaacccaaacacacatgaactgatgaatggataaacaaaatgtagtatatccgtacttactatatatgggatattattatctggtgataaaaaggaataaagtcctgatacctactacaacatgggtgaaccttaaaacatcatgctaaaagaaagaagccagacaaaaaaggccatatactatgtgattcctttcatatgaaatgtccaggatagggcagtctgtagagacagaaagcagattagtggttgacaaagagctggggaaagtggaaatggagaatgactgctgatagctatgagcttccattttagaatggcgaaagcatcctaaaattagatgatgaggatgcttacacaactgtgtcaatataacagaaagtattaaaatgtttattttgaacaagtaaatgcttatgttgtgtaaatgaaatcttaaagccattagtatagctgatgatgaatacttgtccttcagtgtccatttgtgcacatagagtgccatgttcacttttatatagaatgcatgcatttatgtatattgtatacaatgtaggcatttgtaggcatggtctttttgttttcacttgcatggactactgaatctgagggcaggacctttgtgtgcttagaaactcttgattgatctgtgggtcccacccacagatggaggccaattttaacttgtcaactgctcagaagcaagacagaaaattatcaaagagacttgcaccatgaatacttactcaggatagattaagacagtggctcccagatgctaatctgtggattggtagcatttttagtgatgaagtgtctaaaaattagaaccaagtgattaatagtattgtctcaatatgaatttattagttttgacagccatactatgattatgtaagatgtcatcattacaggaagccaggtaaaggatatatagaaactctctatttttgcaacttttctgtaaatatactttttttctacaataaaagtttacttacacaatctactaccccccaaaaaatccaaaaacccaaactaacaacagtgacaaaataaagacaaagacagaaagaccttggcagtaacttaaaataaaaaactctcttctattctaaaatgatcatcttgatattggtaacgttaaatgttccttttatggagaggcattaaatggaatttgcatttattcttttccaacttgacaacataaaaggtgacaattctatgtctccagagttgtagcagatgcagtcagattctgtccctgttctcagccagcactcttcccctgcatgggtgggattctctaaagagtgctgtctacactgtctcccagaggtgcccagggagtctgtgccccagtggcccacacaggtaacctcaaactctctgctgggcaccctattgactccttgcctcctctgccttccttccccatccctactggtgtttgtcagggttacctcctgctaaaatatctgcccttggattcctagccttggtctgctcctgggctacccaaattaagacatttgtggtttgtgaagttgagaatatgggactactgactaaagcttaaactgaaatatggaataccatgtgtatgtgtcatttccaggatggccattagcacagaccaggagtggtgctagaccctgggcgtggggactcgattcctcgggttgtcacaacaaagtatcaacaactgagtgacttacaacaatggaaatttattataccatctcacagttctggagagtagaagctggaaatccaggtgtgggcagggccatgctctcttggaaagctctatgggaggatccttccttgcctgttctagctcctggtgtttgatggcaagccatggctttccttggcttgcagctgtgtggcttcagtctctgtctctgtggtcacacagtgttctccacgcatccctctgggcttccctcttcgtataaggacactagttgtattggattaagagcccactctactctgacctcattgtagcttaactaattacatatgcaatagtcctgcttccaaataaggccccattctgaggtcccaggaaggacagggatctttgatggacacaattctatccagtgcaggatgcaaagaggaagacatggacaagaccctgcctcaaggtgcttatagacaactgggtgtgtatgcatgtatgtgcagatattaactaaacaaacagaagccaatgaataattacaaagatatagactttttaaaaaggatactctgagctcacatgagaaagcaagctggcccagcctgaagaggtgaaggcgagaaagtccagaaacccaggtgaaggataggagcagccgtgggtgaacatcagcaggtgttcacctcccacctgaggccaggcgctctgttctcactggctgtgcatcgaagttattttaaaggccctggaagggctgagagccagggagagacaaggggcagaaagaagagagcatgtggagtttagcaggtgcactggatggaggatggagaaacacccagttcagtgacctacatacagcaagatcagcaagatcttctaggagcttccaggagacacgccccatcctacagatggacttagttctatgaacacggggtccaaggaggacccacaggcatctggggatgctaacatagggtggcctctacagagcccttgctgcatctggtttaggttggctcagagagaaagatgtccagagtggaggtgaggggagtggagagaggaatgggagggctaaaagggcaagggacctggagagaaaaggaagagagtgaggagagagggagatggatggatggatgggaaaggagaagaaaaggtagaaggctggatggagaacatctctctacagacaaagaagacggggaggaagagtgaggagagacgaggggaaaaagaactgaggcaaggggagagagagagggtaaaggagggaaagacagatatggagaaagaaatggagacctagagacagagacagaggtggagagagatggagaaatagagcgatagggagagggagatttctttcaggagagcagagtgcgctccctatctggagcctgaagaatggctctgctcctcctgctttcttcctcccaccctttcacctcccttttcgctctggaacattccctgaggtcccctaatgcacttaactattgccttgctaaccaaggcctacacttgctggctgaaaaccacgtcagtggtttcacccagaaaaaccacgttcagcattcagcttccaacaataagtggcataagtaatagcatgggaccccctttgctggaggggcttcctgacaatttgttctctctgcgatgttgagactgattgcctgggaaagacaatgaaatcacacgggaagtcctattattggggtgaaccgtgtgactcactggctgcacagtggtgcatggggcatggggcgttatttgggactctctgggaagcattagatatgaaattactttgcatgatgcagctcagacgtgaatagtgcaatgctcaggactacatgattcagtgagaaaatataaatggaaaattactggagctgaaattttattgcaaagttatttatctttgttattactttctgaatccttttgtgctttttgttcacagcgatggatagaggcactcttacttacactttaagtagagattaggaggggaaaatattcctcgctgtaccacaaaatacagattaagtctcagctcaggcctctgatttcacccattacaatgaaatgtctacaaactgaaataataacaataaaaaaattttgtagtcttttccgcagacagttcacatggcttcctactgattccatttagcctttcttattagaatattaatggcaaaaatagagctctgatggagacgtgcctgggatttcataattgcacggactccagcttgtaacccaggtattcagaagatggggctgggaattttgttgaatcagacccgtaagataacaccaaaatcaataatctaaatagccaccctttactttttcaaagagctctattatgtttaggattgtcaccaatattctcttctttgattattttttaaactgtatatggtttttattaaaagaaaaactaattttgcttataaaataaaaatatgcattgcaaaatatatgtatacataaacatacacatttaagagagttttaacaaaagattttctgtttttacattattatcatgcaagaatttgctgctgtattcagagaggaagaaataagagttttccttttctcttctctggtttttacagtcatgccgtgagggcccagagactgtgtcactgttgtgatgatagagtgcagggcccttcaaagggaggtctgtgggccagcagcacccaaggtaaccctggggagcttgtcagaagaattcaaaatgtgcgtcctgggcccccaccctggacctgtgtggtggggcccaggaatctgtgttttaacaatgggttcaaggtggacatgcttggatacagaggccttttcactggtagatgttgccactgggtgggaattaggatattgtgtctggagtcaaattgcctgggttcaaacctcagccccaccactctgtcccttaactctgtggtatcaggtaagttatttttttcacttatgtatttatttatttgaggcagagtttcgctcttgttgcccaggctggagtgcaatggtgcagtctcagctcactgcaacctctgcctcccgggttcaagtgattctcctgcctaagcctcccaagtagctgggatcacaggcacctgccactatgcccagctaatttttgtatttttagtagagacagggtttcaccatgttggccaggctggtcttgaacccttgacctcaggtgatccacctgccttggcctctcaaagtgtcgggattacaggtgtgagccactgctcacttgcttatcttaaaataatgccttggcagtggggtgaggtgcagtgggggacattttggggtgcttgcaagtgtgtatcctcattctctgttaatcccaaagggctctcctcccaagcacccaacgagcaagatgggtctgaggatacctgtgagaagtaattcaacacatctttcacacatgggccaatttgctggtctaagttaaattggagtgacaaggacagctgcttaaagagtgagttctaaagccccaggaattaggtgatgtcttgagctggggtgaagcaaggcaagtgggatggggagagatggctggcttctgcaggagtgaggctaagggaggaaggcagggctgcccggcagcccgcatgttccagaagaggccacgagagatgtctgtcccacaggggcttatagcaccttgcactccctcaaagggcggtgtctcatgtcccctctgttaggctctgggtgggcttttgtgacagctttgataatgttctggaagagatgctgctgggcttctgggctcccgcgaccccttagagaaagtggtgcagcttctcattggctctgtctctctccgaacacgccccttttggagccctctggaaaggaagacactgagcaaccaaataacatattttgacactaatttcctgagaccatttttcttttttcttttttttttctttgagatggagtctcgctctgtctcccaggctggagtgcagtggcacgatctccgttcattgcaagttccgcctcccaggttcacgccattctcctgcctcagcctcccaagtagctgggactacaggcacccgccaccactcccggctaattttttgtgtttttacagagacgaggtttcaccgtgttagacaggatggtttcgatctcctgacctcgtgatctgcgtgcctcgacctcccaaagtgctgggattacaggcttgagccgccacgtccggcctcagaccatttttctagagatggtgaaattgccccttacatgaatcaagcaatagataaaaatattggtccagtgtttggggagaatggtaggatgttctctggctgagctctctctttccttctctctctctctctctctctctcttcctttccttctcctttctcactctctcttctccccatttccactctctccactaggttctcttctctctctgtctccctctcaccctctttgtcactgggctctctttacgtgttgcttttctagagaagtaatcccaacataaggtatattgagaagttttcaatggttttcctctcagaaccctgttcatggggtctagcagggcatgcaccccaagaatcctaattcttggaattttaaatactaacatttggggatgaaggccttgtttctgtgctatcaaacaaataatatttctgtgaacacacacagatgcatgcccccccccctcccacacacacacacacaccccactccagtacttacatgcacgtccaccttcttccaggaggaggaaaggaaagggaaggaagctttttctccattgcccaaagtctttgatatttgtattagtctgttctcacactgctataaagaactgcccaaggtgggataattcataaaggaaaaaggtgtaattgacttgcagttccgcatggctggggaggcctcaggacacttacaatcacagtggaatgcacctcttcacagggcagcaggagacagaatgagcgccgagcaaagggggaagccccttataaaatcattatatgagaactcactcaccatcacaataacagcataagggaaaccagccccatgattcaattatctccacctggtccctcccttgacatgaggggattattacaattcaaggtgatatttgggtggggacacagagctaaaccacatcaatattgattccttatttactgattttctaatttcctagaattcatctgggccttgtactgtcttttggtgcaggtttaaccacagtcttgactgtgttaggaagtctcctgatgccatggactcagccttgcaaaaatggtctcctctgtattttatccagttctttagagtaggtagggaattttattgattgaaacatctttataaaaagactcttctccttccatccctcctctgaaacacatttctttctcttgacatttcataaatttctggttatgtttagtaataatagcaagaatagcagtgatgatagcagtagagttgtagtaattgatccatatgctaaaattttatgatgtctcacatttttctttaacgtgtataaactcactgattctttgggaagtcactcagtgggtttgggacgaggctaactgcccttgtcttcccatcaagggagctgtcactcagacaagttcaatcagcacaggccatcccctggccttgggatttgtgtaaggatgagaatgagaccccaaatgccccataagaatagatcatgtgggtggggtgggagaaaaggtctcctgctgtgagatcagaactgtaaacttcatggaagcaggggctttgtgcttgtccctccttcttatggagaaagactgtctggacatgaggtgatccccaagaaagcaatcgaggggacatgtcaagaacatttgaacacagagtcagcctcgcttcatttccatatgtctcatgaaattccatttacatgagctagcattttttttctataactcagattgagttcagttttgtcatttgcagtcagagtcttggtagtacaattactatggccatttcgttgatagcaagctacagatgacagagccgaggtcgtctcctccaggtcccagagctgctatgtggctgagctgcagttcagagccagggtgactcagcttgcaagcctgtgctcctcacctccgtggcatgcttctcccaggctggcactgaatcaccggaaggactccttaagacatggataggggatccaccccagaggtcctgaatcagcaagtctggggaggagactgagaattgacttttctatcaagttccccagtgatgctgatgctgctggtgtgcgtaccacgttctggaacctccgctccctgctctagggccttctgggtggagccctagagctgagctcccagctgtgggcatggcaggcactgaagagtgttgctttagggtaatgtgttaacagtctaagaaggtgcgtggtgagtaggctgaccatttctctctcttattgaacaaaatattgctaagccctggattttctcagctgtaaatcactgaaatctgaataaaattacccctacaatgaatcaatcaatagattaaaatattggcccagtgttcaagaaggactgaaggatgctcattgagctctctctttccttctctctctcttttctccccacccacactccctcccccgtgttctcttctccatctttccactgtccccctctcctttgctgggctctctttatgcattgctcttactctgtaccagcacaggtgggctcttggcatgtgacagggcagccagccaggcagctctgtgctgtggggtgatcttctctggcggctccgacagacacgcgtgcaagaggagactctgaataactgggccttagcttggatgcacctcagtcatgctgtgggcagagagagcctatgtcaccagaaaaaaggagagggctggagaaacatgctggaaagacaaacagcaaaaacattttcctggatcatcctggcccaatgtaaccatgagtcattaaaactggaggaaggtggaagagtgctcagagggttgagacaggagaggaaggagaagagattcaaagcatgaagagactcagcactgctggctgggatgatggaggaagggggctacaagccaagaagtgtaggctccctttagacactgggcagggcccgcagctgacatcaaggagacaggactttggtcttgcaacagtgaggaaatgtgttccactcacgcagtgagcaggcaaggaagcaggttctctccagagcctctagagagaaaccacagccctaagacaccttgattttggccccgtgagacctatgccagccctcttactgccgcagggtgagataggaaattggtggtgtttcagtcactgaatttgtggcaatgggttatagcaacaatggaaaactacggaagaaccaaataccccagctgtatcaaattaagagacataagccctgttgcaaaccctggctcattgcctcacctgcagggtccgtcgtcctccctgaggtgcagtttccttgcctttaaaatagaaataacagcacaaccaacctcccaggttgctcttttaattgaataacattattcttgtaaggcacccagcacatactagctgttcaataattgttaaattatgaagaagaaccaagagaaaaaaagagagagaaagaagctcctttgatattttttggacttttaaaaataaactgggtcaaaaagaaatacagcttaaatatatgttgcagactaattcagttttgaagtcttttgagagcttttatattttcatctctataaaattgtagagtgcctgaaaatactccaaaatacattaaaatttcattagaaggtgctgtatggggccacaccttatttttcttgaaaggaaaggaatgtgaaggggagggaaccagaaacacataatttcaaaattccacttccaaatgcatctattttttgacatttaaaatcgcaaacagattcaaatgccttggctatagtgtcacagcaagttgaaaaccaagcacattaacatggaattatttctgtattaaaaggttaaccttgtcggtgctcaaatgtgcttgcttcccatttcatatggctgggtgtgtggtttttctcctgcattacatttccctatcacacaaaacagccttgacccaactcttttatttttgctcgacttccctgtcttttaggatggacataaaaccttggagtcttggggttggagtcctgtatacaccgtctaccaggtggggccgtgggctggttattcagcctctgtgattctccctgctggcacctgtaaagtggggacaacagtggaactatctgactgattgagtggttggaggatgggacaagagaaccccgagaatgcacttggcagagtagcccctgaaactcacaggctataagtgttctcatcgcctccactcacccccttaacagttctagtgccgagtatccaacccaggctggtgtttattcactccagcgtcacataagtaatgtcattcaaggtctctggatcttatccgcctgtcttttacttctcagctcctaggtgctctgcccattgatttgttgctgctattctaggagggtgtacattcaaaaatatttatcattcttcccctgcccaccctaccacccacgccttgactgtccagggatgagggtttattctcaaatcattggtcggggccaagcccacacacttgcagtatggaatcgtcctttactcattggtttattaacagaaaatcattttctaactcactattacaataacaatgattattgcaattgaattgcaattcaaggtgtcttccagtgtttcaatggttatttttatttcgcagttgccagtattgctaataactcataaggggttacagtcatcacccactcctattagcttcaaggtgtctgcagcagatgcagggaggcaggagttcttgcggggcagaggggctttagcaatccccttgtctgagtctcatccagggagtcagcttctgtttgattcctgtactcgtccccctgccacttccacctgtccaaggcttctgaggagctgtctggtacggaggcacctcagacccgccaggacgttctgtctgacttgacgtctgacttgacatctgccctttgttctgaggggccaaggtcaggcagtggaaggagagctggctgcctgcctctctgcacagggaggctgagtctacttcagaccacctgtctccaaagctcagaccacttaagatgtgaacacagaaaacctgcaagaacctttctgaggggatgtggggtctctgagttgggatttctctcgagataaggatttgagtgattgaaggaaacaccagttagagagtggggaagggagacagggactgaaggaggttgcatccttgaaggtgcatcctcaagctatactccatgaggcaactgaccccacttgcagcctttgtggcaccatgagggaagtggagaaaatgtctctgcactgtcctgagagaggtgtgggaaagcaagggctcatctgcagcctccacccatcctgggccaaggctgctcccattacccattctggactcagagctgcaagtgccccccaggtagcagccttccgtgttttgaggaggctcctcacccttctccagccagcttctttcttcagcctgatgcttggggctcctggcaacttgaggtccgacctcctggctgtagtggtggcagtgacagagagagggcttaacagaatctccatgtaggaaagaatcttaaagggtgagcattaggtatgtaaagggagggtgtttactgcaaactgcaggtgcactgatgcccatgtatgtctgcagccactgtcattcctacctggagagagctcaggagagagatggtcaggacagaagtccgtctgtggctgagtcagtacctcaggtgggaagaagctgatggaatccttcttgggcagctcctgcccctctccagcctaactgtaagcagtttggagccccagcactggccgggggcggggaggggggcggttcattttctccttacgtccatctggagctccctgaaaatgctgacaggaaggtacaggatgttgcagtccctgctgggctggggcagcccagtgtggcctctccaggtggagttccaggctgccgtgcagtcaggtgggagaggaagtctaggtggatggatggggccatggcttcgagctggtggacaggcacctggtaagaactcctattaggacactcagaaatttctggggccactttgaggatcctcatttcatcaatcaggccagtaggtagatactagtggagggtgtctacccaccaccagggggtcagcctacccattagcaaacacagggaaagtccagttgatggacaggctgtagagtaacaagcctcaagattaaggaattgtttcatattaaaaggagactaaagagatgagaactaaatgcaccaagtgatcttggatggatcctgtgcaggaaaaaaatcctatcaaggacattattgggacaattgacaaaattggaatacgatctatcatttagatttttgtattaatgttatatcttctgaagttagtgactgtgctgaaaatatgtaataagtcttgttcttagagtgtagacactgaacatcatggagaaatgggcacggtgggtgccacctgcctaaaaatgactccgaaacgcaagcttgcacacacacacgtgcacacgtatggaaaactaggcaaaatgttaaaaattagtgaatctgggtaaaaggtgtattggagatctttgtactattcttgcaaattcttttataactttgaaaataatttcaaaataaaacatttcttaaaaaggtattttgaaggccaggcatggtggctcacgcctgtaatcccagcactttgggaggccaaggtgggcggatcacgaggtcaggagatcgagaccatcctggctaacatggtgaaaccccgtctctactaaaaatacaaaaaattagccgggtatggtggtgggcacctgtagtcccagctacttgggaggctgaggcaggagaatggtgtgaacctgggaggcagagcttgcagtgagctgagatggcgccactgcactccagcctgggcgacagagcaagactctgtctcggaaaaaaaaaaaaaagatattttgaacttaggtttagttacaacttaggccagaatagcacacccataggtgcacacacaggattgtctccctgaaggtaaacagccccctgcccccattactcctacccccaccccaccccctcaccgagcgtggttcatggagcacccaggcaaccccactgcagacgccagcattcgggtgcatccactcaggaactctgatttgggactcatgcttgaaacagccaattgcgtttttttctgtctttatcctcttattccacgtgacctcttttgctgtttgctctgaagctgacccttactgagccccaaggcccttccaagtgaatcatgactgtgtcacatggcctgtattttaagccagattcttgctaacatactcgcaaaattgggtgaaaatttatccggtccttttggcatgatgtcatgaaagaaacttaatttttttgctagagtgagcctgtcaggcagggccaaggaggttacaggaagggtatggctcacccacagaccctcctggggaagccaatatccaaaatgcccaggcacaggaactgttaggtcactttcatcagtgagagggatgggcagagggccaagcactcaccctcagagccagagacattgccccgaggcacctttatattagaaaacgacaggaaatagaacagtgccacacaggcaaagcatctgtccattgtgatcaaatcaggtgcaaagtataagaaatgagaggaccctgtgatgttgctggggtcttcctttctcagtatctccttgaagctgaggtccaggaggggctgggtctggctggaagaaggatttgcaagagaaggaaatctacccccaacccccagaggaaagagggtgctccccgtggtgcacagtggcagcagctggaattagggcaggcagtgtaaggctgctgcagacacagaaactgaaaacacacaaggacactcccagggattcataaacacaccagccaggtgtcctctccacagcccatttgcagctggcagaaaaaccctcccaatctgcagggaggagcttcacagggaccctggagagaatgttgtgcttcagcgagttcacataaaatcatctctgacggtgttgaggaaaggtgagcaggggactggccaccctatattaggtttgtaaaattttaatattattccttttaatttgtgaagtcaatattttcttttctctgtgctgggaaaggctgcgccgtgggggccgactcagggtcctctcctcgctgggaggccatggcctcttatgtcttattcactggcctcctggcagactcataatgagcccacggacctgctgtggaatgaagccaaagctgtgagtgtgtctgggtgacttattctcctctcccagtgccagggaactttggtctctcagtcactcatggattcagcagatacttcggagcagctgttatggaccaggtgctcatagctctcacatcactaggtactgaggtgagagctgtgagtagaatggcaaagtccccaccctggggggctcacattccagccaggagatgcacaggaaataagggagcagacagccccacggggtgtgctgtgagatgccagctatgatgaagccgctcagggctggagcgggtggctggagattaggtgggtcaaggtcttcgggaaaactgcaaggccacctgagcccaggggacaggtgccttcagatgaattaggggtcagggagtgggagcagtggaggaggacctgggatgtgggaaacagtgggaggagcacagcctgtggggctcaggaagggttttgggttgcatctgagtgacaggagaaatgggtttggagatagagtaatgacatggtcagagccgtgtttttataaggagcttctgatggtgagcagagatggggtctggggtcaaggacagaagcagagggatgaggcactcagtatcaaagccagtcaaatcattagaatgaccctacttgaattcagtgtctgtgatcctcaatggctgcccagactgagctgtgcgaggcagagtgtccctgttccttatctgtccccatgagtggtcatggtattggtgacagcgggaagcagccaacacttagggggtactcttgatgggctagaccaatgcttctcaacaagggggattcttctccacagcgtacattcagcaatgtctgggggcattgtcattggcacatttgggggttgtgctcctggcatctagtgggtgcaagccagggatggcgctcagcatcctgcagggcacaagatgaccccacctcagagtagtgtctgacacagaaagtcccaagtgctgaggctgagaaatcttgggccagaacaggataaaggctacgtgtgctttgcttcatttcatcctaggagaaccctgtcaggaattatgattctcattgtgtagttggggaagctgagacatggaaggctgagctgtctgacgtgacgcagctggggagtggccgagctggaaatggagcccaggtctgtctgactctggagtctgtgcctttgactgatgcagaaattcagaacatccgtgctgaggcgtagcaggggtccagcatacacgggggctcaagtgcataaaaaaccctctctttgttttgagatgcaagttcgtcaggacctccaaaacattgcctcccatcttcccctcctccaaactgttcggcgatccccttggtttgttcagcctccccagagtcatcaaaacattgacaccgcttccctattattcatcaaaaatgcaccctgtcacaccagcaagccaggggttaaggcatctcaaggtgagggtggaggagactgagttcagcagagggtgagtggccctgtgggagccgtgcccggacatgacagaggtgggattccaaatatgaaaaacaccttcctcctgccccaggcccctttcttatgagaatccaacaggcagccagtggtctccagcatggggattcctggaccacgtcatgtggtaggtgacccctgaaggctcactgcacctgctgtatctattggacatgtgtgtgtgtgtttgagttgaagactatgtataggaattcaattcagcagacatgtggatgcttaccacatgcactgcctccacttgcttttgcctgtgtgcacctgctcatgcaacatcttcatggcaaacccaggggcacatgcactggggtagtgcaggatccaacggtgccatctgcacccagcagactttccaggagagaagattgactgagcactcagccatcaatgtcagcctgtagtggaaggctctagggcaaaattcttttatgggcatcgcagaacaagtcttcattgaacactgtgaaccagacaagtgggaaggtggatgaagagctaattcactgaaacaaggtgagaccccacggaccaaccaaaatgtggaatcaaggctgctactgtaaggactttcagctgcttaatcatgtatattccttctcctgttatagatgagatgcccgagaatgttccctccccaactcagaatcctttgcaaaaccaccaggatcttggacaaagaggtaatgaagattttctgcaattaaaaaaaaaagaaagaaagaaacttggaatgaatctatttttgccacttcaagtgtgggttcacctgacccataattgccatgttcctgctcattttgcctctccgcccccaactattgatttgatttgggagataaatatgctgcagtgttatttagagtcaacctgcctctgagtgtcggttaggagggtggggaggagagaaggtggcactgagcagaattttaatcaggttttagcggtctctacctgctcatgtaactaatcaaatactcctgtcccgagggcagaaattcacacaatgcatttccattaaaaaattactctttaatcaacttcctcctactcagggccatccgaggggcaggaggaccaggcattcttgccaaggtcatcctgattgtggaagcttgccaggacagagtcccatctctggaacaaagtcttctttgtgcgtggtgagatggagttggtgtcttttggttttattaacctagggactatttacccatctcactatttcccttgcatatgtctaaaaggcaaaactaggaaagggctaggtggtctctgaatcctctcctctctatctccctaaaagaggtggctgtttctgtcaagaccatttggtggctggagagacccacggcagatagctacttactcagctatttccgtgtgtgtgtgtgtgtgtgtgtgtgtgtgtgtgtgtgtgtgtgttgcggaggtcttcatatttgaaaaaatattttctttatatatgacaatacttgattccaacaaattatatcataatgctggaagtccaggcagcctgttaagccagagtggcagatccattatgtggcctgggaatcagtgtggaccctttcagtgaccctgaaatcctaagtgtagataacacaccctgctttcacgctgaagtgctgcaatatgacccaaaaggaagaaataaaacctctcagttgttgttgctaagaattcctattaccaagaaaatccattcatgcagtataaactgttggttttcttagagggcaaaaatcagggttaagcctgggttttggcctcctacaaaaacgtaaggcagcaatgaggaaagacgtgatcctttactgaaagaaaacaaatacttaggatcataggaaaggtttcacagctagattttttttgggatggagtctagctctgttgcctaggctggagcgcagtggcaaaatttcagctcactgcaacctccacctcccaggttcaagtgattctcctgtctcagcctcccaagtagctgggattgcaggtaccttccaccacacctggataatttttgtaattttagtagagacgaggtttcaccatgttggccaagctggtctcaaactcctcacctcaagtgatctgcctgccttggcctctcaaagtgctgggattacaggtgtgagccactgcgcccagctggcttcatagctagattttggatgctagagtctgtggaaattttgtcttctctctctgtctctctctcacccttctgaatacctgccccattttctttacttttctaaaatgtttccattgcttttctatcttgctcatgcttttcagttgcaaatggtagaatctgtcctagctagtagctagtttcaacataaagggatttccttaaagggccttggttagctcacagcatccctaggaaagtcagtgacttgggcttgaggtctatgcacccaggaacactagccctcactgagctgcttccttcagggtccaggatgcccactgcccctgctgtctctgaagcttgctgtggggcaggctgatgctattggtgtagacctagacacaggtccctgcagttaggacagatacctgacctggtcccacatgctgtgaggacacaagaccccgtgtccttattctttgccagagcttggaagcaaggaagacagatacatcaggacggtgcctaggcagtctgcagctgatggtcctctatccacttcataatctttactgtgtgccagtgaacaagagccccaggtgcccaccctcctcagagacagttctgtgcgaaggatagaccaaaccaagcaagcagacaaataaatcacagtaattgtatgaggaggaaaatcagcaaggaaaccagcagtcagtgtgcggagagctgttccccagatggagtcaaggaagtcttcctgcagaggtgacgtgattgagacgggagttggggaaggtgcactggaagctgggtgggtctcagagggcagcctggtggtttattcggcctggttgtgtgtgccaggcacggccgagggcactaaaggaagggtgcctcactgcagaggaggaggaagctccagtgccggcaggctcctgggatggagtaaggacatgtgggtgtcgggatgtgattctggtgaagcatttgagccctaccactccaaaacctgagttcaagaactcacccactacatatgagcagtgtggacttgtgaaaattaacctctcttatccttggctttctttttggtacagtggagttgatgaaaagcatcagcttcagaggattggaggaaaggcacgtagagtgctgatgacagggcctggcacacagcaggagctcaaccaatgctcagcgctgagaagggactcactgtgcttagcaatattgctgcgggaaagccagattgtcccttcaggatccatcaatgccgagggcaaggagagaaaagcatttgggattttcttttatgggtctcttctttcaatttcattttcatgtatctcaatttttgttgactgtattcaccactacttcttgactgttttttatgttctaggcacttttcacaaatatctatttaatccttagttctctatgaattaaatagctatttgtgaaatcctattggtggaatcctcccacctttgtgagtgtgaatgtgtgtgtaacttatgtatcatagagtttaagtaaactgttaaatattacacagctattgagtggtgtagctggggtttgaaccaaaatctacctggctccaagttccttctcctgactgatattagtttgttgggcatcacgaggtgagggcatctaaaaagtcttgtgtgtttagatccttcctggatttctcagggacttgtttctgttgaccaacaggtgttaggaggtagaaggaaatgcatgtaaagtaccggcctgcaactgttgcttctggcagaagagctgagcttcacccatctctgccattagataaaggatgtggttgctattgcccaagagacttcttcttggaaataatgccggaaaaaaaaaaaaaaaaaaaaaagcaattccttgcaaatccagcagtcactaaaaacacggagaactaagtttttaggatggtcaaaagccacccacctagtccattttatttgtttcctgttcatttcttttattttcttcttctatctccataatctttatttccccacgacaagattctcatctaactctctatttaacataccaatgcttcttgaggacgccgttatctattgtttcttacggtgcacattcattagcacttgccagagaggggctgtgtactgtcatttctgcgcctgcctttgttagttttagattaattcctgctgtggtcatgttctttgggataattttatcaagattttctttctcttgctttattacttgctttcttggttactttattaaattttaaaatgtcttattaaggttacttctttcattgtgacaaaagtataacttttccaactttgctctaaaaacttgtagaacaaactcttaatagccgcccccctccccagggacatggggcaggactagggtgggagtgtggtggggaagaagagctcttactttttagtctaaatgtttctttatggcttcaattatttataaccatcacagactattttaatgaattgttttcagtaataaataagacttgtagatctgataatgttatttttataaacttttttttaatcaggccatgctcttcaagatgcagaggtataagaagtccttagtgaaataacttttaagaactgtgcattaaaaagatggctaatggcaatcccagcactttgggaggccgaggtgggtggatcacgaggtcaggagttcaagaccagcctggccaacatggtgagatcctgtctctattaaaaatgcaaaaattagctgggcatggtggtatgcacctgtaatcccagctactcaggaggctgaggcaggagaattgcttaaccgggacccaggaggtggaggttgcagtgagccaagatcacgccactgcacttcagcctgggctacagagcgagactctgtcaaaaaaaaaagaaaaaaaaaaaaacaaggaaaagaaaagaaactagtgtgaatatgagagcttcattgaatccagggatatggcttaatagagatttttaaggccacttgacctaactagagtttgcagctcaaatagaagttttattgggttctgttattggattatccagtggggcagaggtagagctgccagctcccaaattaacactgtagattggcatctactgcaggcaaatgacttccaacttggccatcactgaaaaccatatggaaagacaatttacaaagtctctggaggctttttggtgacttagtgattggccttttggaaatggacagagcaaggagacagaacaaacctgaatatttggtggctgcagctcttttggtcttcacaatccattaagtcctcacctgggtaggtgtctacctgttacaggtgggcaggtaagcctgctcgctggccatggaggcaggacacctctggatggaaaatgagcctgtctcggagagcgacccctggtggatggggagctttcctgcacttcacaaacatcactaaaggtgaatcccattcccctcctctgtctacctccttctctctgggctcgtctctgtttccagtcatctaaatagaaaggaatccttaaagatacagtagtcaaaacattgtaagccctctcctacccctctgtccactccccacactcacacatcagatgtgggtttcttaaatataaatctaggattaatgcattcaagcctggttccttgggggaaagctggaataaccagcaaatgtcaaaatgttttctttaaatatctaaatgagtggaaaataaaacaatataatttccccaggaattacctggccactggtcttttccatagacatgatacatccccttatttctccccagggtgaatccagttgggagtatttgacactgcagatctcgggtgctcagagggaggcaccattagtttaataagagaaggtcctgagtctgagggttctaaaggtggcccccatagactctaggcaaactgctcagccacggtctcatgaatatcacatctttctgtaggtctggaagagacctggcaacacctccagaaatggcctccttctctgggtagtaccagttaacctctagaatctagtataactcgaaatttttattggaattatccaaccattaccctgctcgctgtattagctctgccctcgagcgctcttgactaagtatcaggggaatgaagagctttgtcaattggaacccaagcctcctgatcttaattagagatgtgccaaagtacctgaatttaatgggggaggttggcagacagttctctctccacccctcttgcatttaatgacttcattactgattactgtccacagcaatgcagaaattaaatatgctctgcagaaaagcaaaaaggttgaaatgcagttgcttttgcatagcaagttccacgcgaagctttgcactgtttgcaaaacggggagagccaagatgttagcatgcctcccccacacataccctgccacagcgcagctcagcccagcagtctggcctcccaggcccgggaggggcccatacggaaggtggggagaatgaattattcatgtgctcgctcccatccacagataattcaatattctgctctcaataatctttgccagcgttatctgtattcattctctcgttctgtaaagaaggctgctaagtaattgttaaatatctttcctgctccctgaataaattggagatacagaaaaataatagggatatgattgcaacatattcatttggtcatgtttgccctgatttagtggggcacagcagacagctccagcattccagaactattgccatacaccgagaagggtcaaagtcacacttttttccaacgatttttctcagacactcatgctccttaaagctccctcataacccatcaccctgtggtggggacaccaattcttagcgtccaggtatcttttccactgaagagacattcacgtcaaaattctgacagttttcttcttttatttaagctaaacatttccatttgagacaagaacattttaaccattacatccacaggctttgtatggtgcatttgcaggttcagtatctcccaggccaagcaacagtttgtgcatatagtaaatacagctggaggaaactgtgtttataacacttagttagaaggagtaaatagccctgggtactgataagaaaggtaaaatgtatccagagctgctgcagaagacagaggcggaggaaatgatggaaatggtgaccctgttggtaggaaaatcacctggaaaacaaacagttgctttagcctttacacacgcagaaaactttcaaggagaatgacttcgacccaggaggatgggctttgaccttgttcctgaaggatccaagccctggctaagcttggggtgggggaccggctccaggatgagatgtctgtctgtgtcattttccctttctctgtgagcttgtgagccaacccggaagacactgggtgctttggaaaagagctctctgggtttgggggatctgctggggcttacaggtggagaatgggggggaccagcagcgggttagggtgaagatggcctcagagcgtggcgggcttctgacagccccctccatccacgttggatctccagtgtcatcaaggttgtttactgagctcctgcttgcagttggccttgtgctataaaaaatacacttagacacttaacacttctcttcctgagagcttagtctatgacaacagggtcacagatatttataagcacatgtatctattaaataaatatctgctgaggctagtctctcttgctatgaaatcctttctctgcctttattctcctgccttttttttgtcatgttcagctggtctttggtgcaaattcttctgagtaccatgtggtggctctgcgtggtgctgctctgctttcttggtccagggactctcccgaagtacagggtgctttggtgtaaagggttttctcaccagggtgattgtgccccctaccctggcccctatggaatgtttgtcaaagtctggaaacattttggttgtcacgatgtgggagagattgctactgcatacagtgggtggagccctggacttcaccatgggtgcatgaacatcatctgtgcacagcacggcatcctctccccaagaatcttccagtcccagaagtcagcagtgtggcggcctagatgccctcattgataatggggctgccccttcaggcgttgctgggttgaagaccggactgtcacttgccagtagcaggttctttaacttctatgtgactccttgcctcatctgaaaaacacatacctagggctcctcctcagggattctgggggttgatgaaatcgtgcttgtgagtacatagcagagagattattcctggatcctgtaaccgtgcaggcccagctgtcatcattgttgttgttatttggcttttaaacatccaaactgtatatgcttcaatataacctctctgctgcttgttgcctcctctgctcaagaaccctcagtggctccccactttacccacttgcaatgggcaccgcttcctgttcgccagggaaagcacctggtagcttggcccccactgcctgttgtttgatgcttctgagccaactgtcagctgctcagcttcctccaaggaagttgccaatgcttcagaacttctgttggtcccaggcagtatgggggggctgcggtttagagagattcagtgtgtgcagaggtctcctcacctggcatcagtggggaggccttcactcatctctctcctgtgtctacacagccccacctgaccatcacagcgagccttgcctcttcttagatctgtgttcccggatggggtggggtgtggtgcatggagcacccctccttccctcccctgagtccttccctgatggagacagctgcttctctccttgcggaaatacactccggtggcggtggggtggggggagtgggtttaagggacaacttaccaagtgatactggtgaccctcaggaggtctggtgttgccacctatgtggaaatgagctccagggaagaggaaaacagcctctgttatctgacactcggaatctgcttaaaaggctgcctattcccaaagacttccccattgtgcagctgtcccttcatttgctgcagctaaggggcccgccatgcctctgctaccttcccggtgacagggaagcggggctctaggtggtggagcccagccccagcccatcagagcccccagctcttcccctggtaaattctgtcaggtcctctgtcttgggtcacctgtcagctccttccatgggcattccatgagtacctgacagaaaggcaccttttcccagtcattctgcatcatgttacctgcttctggtttctctatactgttgtcaccatctgagacgagctcactgattcatccccttgtgattcctgtgagctctgcatgggaacaggacgatttctatttggtttattcatcagactatccaaagagctcagctgaggacctggcatgccacaggtgctcaataagtatacactgaatgcacttgaatatggcaaaggctctcctcgtgccccatggagagggaagagatggtggaaagtgagatggagcaggggaaaggctgggctcttgacctcatcatctctcttcgtgaaggccccccatgattgaggctgggaccagggcaggctgtcatggatgtggcatggtgacacctacgaggttggtggattcttctcagattctgcagtgccaaggtctctgtcgaaggttacactagtattctgagggacgggagtcattcttaactagacaggtgtgcccatcactccatggctctgggtgaacatttgttgtgttcaggagtctggaccacaggccaaacggagcagcaatgctgccatcagacacggctgggaaaacagtctatggaaactggcaaaggacacagactgtgggcatgaaaggtgaaagattagcccaggcccccactccatgtggacgtccaacccacagctcctccatgtgctgtgagaaagaacccctgtcatttcaatccacaaggtggattgtgagtagcctgtggggcctcagcgctggtaagaacgtcagtcttcattctctgcctctggacaacctcagcccctgcaccttgcaccttgcttcttaactgacccttggtgcaaactgatcctcccacctgcatcctgtctgaccagagcccagtgacccagcaggtgcccagtccctggagcctgctgtcacattctccagaaggcatcccgttcctattggctgcgacaagttttgtttagaagaaaacttgcccaagtgggattgtgaatgggcctctaacattgatgcttctgaaacgccacagcgtttctactctgttcctaagtgtgagtgttggtggcattagcagggtttaaaatcaagagctaaagggtgaaatgttggagcaggctgcagaaaagtcttagaatttgggctcacacagaccctgtttgaatcctggacccaccatttaccagctctgtgactttgggcaactttcatcacttctctgagtccgtgttttccacctataacatgtggataaaacaagtatttcacaaggctcttagctgcagattacatggagtgtgactgtttctgcctgccccaaattcctttcctctctgctaaaagggcccctccttgctgtgaggagtacatttcacttggttcaatatcctgaccttcccctagagataggcaatgatctgtcttgactgaaccaatcagctcaggtatgtacatgtgactaggttgaatcagtcgactcagggacacacatgaccaattcaaaccaagcagctcaggggtgcacacatgactaactaaagccaatcagctcagagacatacatatgacaagaccaaaccaaacaactcaggacggcacacgtgaccaggatggactaatcagtgcagggatgcccacatgactggacctaaccaatcagctcagggataggcacatgaccaggttgaaccaatcagctcagagatttacgcatggccaggtcaatcaggattccccctaagttgtaccctggtgaccatcaagcctactaggagggagggctggagccagggatgttcttcgaacacatagactgggacctccctggagtccctgaactttgcagttatataagccagtgtatttcctctccgccatgctagtctgaattgagcatttcggcaactgcagccaggaacgcattgtgtggtgcagggcatggcgggtgtgcaagggcgggagtgggcccaaggctctagaagaagaaatgtcattttctcttcactgcacacaggcattggagcaactggctggagatgggctgaatggcccttcacagtcactcctaaaggccacccactccttaaacatctgggagaaaccaaaggtgcctctgtgaagccttagctcttagccacttagtgggatgcagactctcatccttgaaatgggcgctgagcaaaatgtatgtccttagtgcagctctgagagagatcttctcacctggtaattccccagtagccaaaagaggctaatgaaaatgcgctttcgttcccaattcctcatgtaattaatttcttctcagcaatgtagagcatggtatcatctccatggattgcaggtgaagaaaagttttgcctttcctgaaaagagactttgatcctcatatgcgtgtgatcaaatcttgatgtaacttgagtcaacattttagggtccgagtctttgtattgagtccctagaagccttggtcttggaggcaggagctgtctttctgatgggcaacataaaagttaagctagttaaggcccttgttaaataagtgacaattggtaaactctctgaatttcaggagcctaagtaaattgagtgtggcacataagggctcacatggaatctggtttcatagggcttgacagctgagcatcacataaataggactgacagtaccaagccatgaattattcctgcataatgacgttcttcgagactaagacaaaagctgtcattacttcattactctgctgtgtcttatttattcggggactgctctgcggaaaccatgagaaaacattttctttatcccccgtacaggattgcctccatcaggcaaaaatggcctgcttccaatcaaagcactcgcaaatcaattatccccagagtcatgaaaattcctggaggtcactgcagactgagctggagagggaaatctgatatgtctctcctcggttcattagctgggagtgtttgcaccttcacagtatccttgctggagggtcttcaaccttttcctgagaagtcactacttctgatttccctgaagtcttatgactgttgatgagaaaagtcagaggccggcacgctgaggacaccttctctaggtcatttcggggaccttcagagaggagattctgtcagtgaggagcatcttggagatttacctgttggtgcaggtggtagccatccctctgggatcctggactctagatgtggttcctggctccttgttacttccagtgatctcagtgtgtggagggaagtggcacgcatacacccaggctgtgcacttgccagtgaagcagatgaagaactttgggggagtgttttaggaagaccagtggacagtgtttgggtttcctcagaagcctagtacagggcttaggagaactggggctgcaagcagactggctaggttcccacctctgcttctcactaactaggtgactgggcaagtaactaggctgccctgtgtctcagtctcatctataaataggttgttgtgaagatcaaataatttaacactcataagatgcttagcacaacacctggtacacagtcagaacggccagcctttatttttatttttattgttttgagatggattctcgctctgtcatccaggctggagtgcagtggctcgatcttggctcactgcaaccttcacctcccgggttcgagtgattctcctgtgcctcctgagtagctgggattataggcatgtgccaccattgcctggctaattttttatatttttagtagagatgggatttcaccatgttggccaggctggtcttcaactcctgacctcaagtgatccacctgcctcagcctcccaaagtgctgggattacaggcatgagccatcgtgcccagccagtgtttattttttaatatgtcattggactgtcatattggattgaaatcttgacaaaggagtataaaagaactaacatattagaaacatatcattgttgataggcacttaaaacgaatagacattgtacctccaatagaaatgcaagtccatggaaaattgctacttgggccaggtgccgtggctcatgcctgtaatcccagcactttgggaggccgaggcaggtggatcacgaggtcaggagtttgagaccagccttgccaacacggtgaaaccctgtctctagtaaaactacaaaaaaaaagttagctggatgtggtggtgcatgcctgtaatcccagctacttgagaggctaaggcaggagaatcgcttgaacccaggaggtggaggctgtagtgggcccgggactgcagcactgcactccagcctgggcaacggagcaaaactctgtatcaaaaaaataagtaaataaataaataaataattgctagtcgatgtccctacattttgcactaccctccatatctccagaaacaatcatttgcataaagtagggtccttatcatgagtgaccccttgctccagagagagatactgctcagcaattcttaatccaaactggcccaacctctctctcatggagggtccagagagggaagggtgaacaaatcttgcagatattttgcaactgaatagctctgtgatctgtatgtgatctaataaacttggtggtttatcagaatcatttccgtgacagaatctagaatgctggatttaatgacaaccatgatagggacacagcactgatttcttttagagacaggttccacaatgccccttgagggctggctagtaatgacatgcagaatcggtttctctctgttggaagggagaagcctggaacaccattacctttttaaaaaacacttttctcaagaagcaagatgctggctggggtgcagtactgcatgtaagtttagacatcagagatttaggctgatcatggttaaaacttacctgattctcagtcctgcttggtatgaacttcacaaaggttagtaccttaagaattgctgacacatttattacaatttcaaagctacaactcaaatcccaggaacacaggattgcagtgacctacataatttgggctcaaataccttcaaggcattccgaagagacagagaacaccagaacaagggagaattggagtggaggtggatgctgaaattccagtataaaaatctactctggctgaggaataagacaaaatgtaagtgatttaggaaaattatcccagacaaatgagaggtgaactttggaagggggtataaatcaagataataatttccatatttgctgtttcttttactttttgcagaagaaatgcaatatagtcgctactcaggaattttgactgaggttggacattgtttagaaatgggaacaagtttgaaggataggatggagggaaggaaaatattttttattgcttccaatatagtggctttcataaagctgaaagtctcccctggaagaagacctcaggggccctttcctgaacaggtgagaatggtttgtaattaacatattaattggtaggtgcttctgaaatgctggaggatgcttgagaaaggacttgagtagttccagcattaccttttccaaattgttcttgtcataaattgactcagccaaccctcttctttatacaaaggttaacttcccgtccagcaggtgtgggttatcacagtctacatgtggcagtttctgtataatatttgcctctgggtgcccctgtgaaaacagctaaaaatagggacttttggagagagaagtctatcgggacagctaaggactgcaggtgaccttgaagccatgaggataagtccccgctttttggaagaggcagccggaacctgttagactgctactgaagctcggtacgttatctataccggcatctaactgctgccagccactaagaaatgttttcttgctacaaacaaaaaataaaaagaaaaataacattatctgcagtagcaatctacagtttactcagtccttttgcatatatgatccttacacaccctttgagataaagagaacagattttgttaccttgagaaaggctgagtgatgtggctgaggtctgagtcagaattcagactcaggccttctagctctgtctaatgcctagaatttctctcctggggcatcatttattcctgttttttttccagtcatttggggggcaccacatcctgtagacaatggtccttgctagagaagcccccaacatcaaaactagaaaaaatagaaattaagaaagagggttcacataacagaggaatgcttctccctcttctcaaaagaattgccattgagtttctttaaacaagagagcatgttgccaatgtgatttggttaactatcacagaggatgtccttctcggagtgtgtccatttgatagacagggacacatctgagaaagcaaagcccaccctgttcaggagacctccttcacaacctcttagccttctctgcctgggcagctcgggccagatggctctggggggtctcccctcatcctgtgcctggttcctggcctgctcccactgctggctgggcttcaggcatgtgcctgtgctcctccatggggcgtgttaataagtggcatggttggcaagtcctaaggtggactcactgctccttcctggctttcagcagctttctttcaaaagagaagacaaaggtgtttctgaaagtctgagcacgaattaactcttcttgttgagctgtaaacttccctattggctcagcagccgtctcctcttacacaaacacatgcctgagtacttgtgtgcatacacacacacacagacacacacacaggcttctctcaagtagacgtgcacgcacacatacacacacagacacaggcttctctcaagtagacgtgcgcacgtgcacacacacacacccacacacaccagcccatcttcttagttgcctgactcaatctgagacccttatggcgagtcttcctgtcagcagtgctgcttcccacgtcaatatccagcctcttattcatgtggatgtggatggttcccctaagggcatccttctttgttcaatctatagtagtggttcccaactgcgagcaattttatcctcttcccatgggatacctggcagtgtctggagacctgtttggctgtcacaactgggaggggtggtgctgctgtcatccggtgggtgggagccaggaatgctgctaaaccccctatagtgcagaagatagcctcccacagccaggtatccatagtactgaggttgaaaagccctggtctctaggggaagatggaataaagatgaaatggcataaagataaagatggcataaagatgaacaattcatttttgtaaggaaccctggcccctggcctagaagttttggatagcactgggatctgtctttggaatatttgaaaaggagagatatgtccaaactcacagaatgatgcccatgcatcatacaaatcttgcctttttaggaacaatgatgacaaggacagcaacggacatttttccttttaattacaaagtgtggctagtaagcagggcgccataacttctaaattaccgtcctccacggggctcattccccgagcagccaggcagaggaaggacacctggtctgatgatgtgctgatcatgtttgagttacaggcaaggagaatgatctggtctttgctgaaacacttttcctcctgttattaagatactgcattgaaaaaagacacttgcagtgtttggtgctattaataattctccatttgtgacatcacctatatccccagagaaacagagtttcaattactgcattacaacaaaactcttgcaagattgggctgatagatggagatattaaaatggagaggctgagagtgtctgcctgtgtaggggctgtgaggaggggcactgtaatttaacatcgagatggcatttgaacaggagagcgagagtcatcatcacaagaagcagaagcgtctttggcttgtaacagtattaaatataatttgccactgaatgcaccagctatatttagctggatattgaaaaggggagaagaaggatatgtttaaataaggtttgggacagcttgtcctatacagactcatcacacttgatgtacacatatctctacaagttaggggggaagaagcttccatctaatggttcccttaaatggtggtttctgccccttttctatctcagaaatcctgaacacagcagttctccttaacgaagattttaatgggagatatttgtttgcactgctctgtcgtttctacttgcatgaggctgccatttacaacaacaagtgtaatagcatctttgagctttttaattaaaaattaattaggagatttaagaacagactcattgggggttactgtacaataacatgtttacaaaattaggtctgggctttttgttccagctaagtgtttcaatcaattctgtgtctattaaatgtaattatgtatgatgcttcctcaaaattataatgtagcatttaaaaagcagctgggaaaagtctataattttaagtttggaattagggtaactattaaaatgcaaataaaggcaactgtagttggttgactggggagtgggaggtaacagttaaaaacaaagtttcagccagagagagttcatctagaatgcctgcctgtgggtttcacctttcttctcactcctgctggatcttcctcctggggaatgcgagggaagcaagattgcagtgataccgaatgataagaaccgtaagcggaaaggattaacagtcttgcacatttccttgctaggtatttaagcacgtattactttttaatggaggtattaattgattaaatgtttgctttagattttggtcctttaaacacatatgtttcccaaatactcttcattttctcggttcagaaacagcacttttagacactttggagagaggttctatatgcatttttttctgtgtgcatttccttaatgggtaatcatttgatgagagattttaatgtgtgtggaggcagagatttaagatctggaatgtctgagtactttctatcccattcattcatgaaggtctgcagcagcgtcttcagtttgcacagcatattgagtcccacctacctgataacttcctggacagaactgggttatatcaaaacattatgtgaagtaattaaaaagcagtgcttctcaaagaagatgccagggtctgtttctgcagccagctccctcctccctaccctgtgatgggcacagaagaggtcagttcacatctaactagagcagacttcaagaagcttgctgtggtgggactccccagtggatggtaaaatgataaccagataagagtgatctttgagcaacaaaggaaatagacagacccaggctctttctaagcatacgaggcacagaacttacacttgtcggtgctgatggaagggccatttcaagatggcgccctctccttgcctaatgggacctacagcccaatgatgccttgtatttttaagtagagggaaaactctctatagggatatctcctgaactgcagtgtgtcaatatgcttctgatttgagtgtgttcctgtagatcactgtgtagacataatcattaggcaggcactctatatactgaagaattcaactcttccccagatttttcttttaccttttgccattatcgttctcaatgagagatgtgctgggagatctgtaaaaaatggggtgtcaatgccccaacgtggctcctggtcattggtgtggccatgggtggtgcaagaggccgccggttgttcatctttccatgatccctcatgtctccgcaatgcatacacccggagtccccccaagacaaagggaggtttcttgtcttgctccacaacatgaccgtgacttatctaccatgagtaggtaagtcctttggagggattctagtaggggaaaaatacaatatttctcttgctatgtctgtgtaatatatgcttatttatttattggagatggagtctggttctgtcatccaggctggaaagcagtggcgtgatctcggcccactgcaacctctgcctcccaggttcaggcaattctcccacctcagtctcctgagtaactgggattacaggtgtctgccaccatgccctgctatttttttttgtttgtatttttagtagagattgggtttcactatgttggccagttcatcttgagcttctcatctcaagtgatctgcgcgcttcagcctcccaaagtgttgggattacaggggtgagctaccacatccagccaatatagtattttaaggttataaaaatggtctaacttactgtcatggctttgtgggacctaattaatttattggagctatcctcttttgtctgttttctcaagagtagagttaaaaatttgaattcaaattcaaatttttatggcatttcccccactgtgctgcttgaataccagatgtcaattatgaaattatatttatcatataaacctgaatagaagaagcatttttctaaaaatcatccctcagaaaaggagaatacctttaggtttgtgtttttaaatgtttctcttttcatatggctctctttttattttaaagaacaatcttttgactctggaagacacatttggctgagacaatctctttcagttccagcgttgggtgcttatagagggcacatgtcaaaattgggattgaaattttttcttaaagtaataaaaattagcacagatttggtgaatattccctgggggcaggactttacattttgaaactttgagggttattgcacacggctttgaagaaccactttaaaaagtgacatggccagcagtcctctggagataactgatgtgcacccgcaataaaaacaaacgaaaaacaaactctccttgtgttctatgaatgaggacttggatgaggaatcagtttccattcatacgtggagtcaaaaagtaccaattgcaaaaacctgagaagtaagataagatggtgtactctggaaaaccacattgatcattcactaagtgaccccagcgatggcactgacgtcaaagacgcaagagaagagcctgagtaaaactgtctcatcaggaatgagatggacaaagcgatgtttccaagtccatattttctatatcactcaaatatgctatatgtccaaacaacttcagtgttattaataggcattattaatatttttttaaacctttattttaagtttatgggtacacgtacaggtttgttatataggtaaaattgtgtcttggggttttgttgtacagattatttcattacccaggcattaagcctaatacccattagttatttttcctgatcctctccctcctcccaccctctaccctccaacaggccccagtgtgtgttgttcccttctatgtgtccgtgtgttctcattatttagctcccacttataagtgagaacatgcgatatttggttttctgtttctgcatttgtttgctaaggataatggcatctagctccttccgtattcctgcaaaggacatgatctcgttcttttttatggctgtgtagtattctgtggtgtatatgtgccacattttcttaatccagtctatcactgatgggcattgaggttgattctgtgtctttgctattgtgaatagtgctaaaaggaacataagtgtgtgcatgtgtccttgcaatagaacaatttatattcctttgggtacatactcagtaatgggattgctgggttgatagacttcttcgtcttgtcccaggagctttctccatggagggtgatcatagtctctttgagagaatttcaaatcgaggaaacagggaatcactttatatttgagcgcaagtatgggtgtgtttgttttgctttttaaacatgaaatcaggatcaatgattggaaattattagtggaggttgaaggaactcatcattgataaacacctgctgcttgtgtattgccagataatacacaaaattcagatttaatcaacaaatcttggagtgtgtgttaatacacttgttctcaatgtctaatgtatagcagaattgcctgtgtagtttattaaaaatacaaatttcagcttgtcatattccagcagctgggatggaatcaggaatctgaattttgatcatgcactccactatagctgtgatggagggtgactgagggctgtactttgagaaacactggccctggcgtgaggaggggcctcacaaggaagcagccatcatgctgagacctgaggaagcatccagggaggacatccatgcatgaagatccagcattaagaaaaagcatgggcaacagaatgccacacagcagggaaaatggaggaactggatttatatgtggagagtgaagaagtaactttacccaaagggagatctggcctatgtccttggctactgggagtgatctctgggttcctggaatgttcttccctctaggagtgtccaatgtttgcagtctaaacatgtgattcatgatgaggccttcgggacatgccacatcagtcccaacctctggaggaattggagaacaaagataccagcctgaccttgcaggagagacaggagaccaagggccagccacacagacactgatggctctggctggcaacatgctggagtgtcctcatgcatcctacctgggaggaggtaacaccagccaggcctttgtggggattgattaatgggaccagaagcttccccgtgggacccctcctagacctgccctagctgtccctctttttgtctggttctaatttgtgtcattttactgtaataaaactgtaattataaatatagcattttcctgagttccgtgagtcactcttgtgaattatccatcctgagggggttgtggaaacctccaattttgtagccagatgaccagaaatgagagtgaccctgcagacccctggacgtgtgtcagaaatcttggctggcttggccatctggagagctgagctcctaaccctgagtttgactaagtcctctgcaatatttcatcctgaatgagtctcaggaacacagactaaaagaaagaaataagtttcacaaaattgagataccatttacgccaattttgaaagaggatagaagaattccatatactgctttgtattgtatatattaacatatatacatataattcatattctaacactcaacatatatttacatacatgtaaagtgcataggtaaacacatatacattttatatataaatcaatgtattcatttatatttacatacaaagttttaatatgggaacagaaggatacccaccaatttcacaatagtggctgcttctggggtcaggataagaaagtcaaatgacaagctcttaacgtttgttaattatgggtgatgatgggtgatgattattggatgtttgcactattgatagtccatatgttttttgctatttaaaattaatactttttatagtggagatggagatagtggcttttttttttttttgagacagagtttcactctttgttgctcaagctgtagtgcagtggcacaatcttggctcactgcaacctccgcctcccaggttcaagcaattctcctgtctcagcctcctgagtagctgggattacaagtgcctgccaccatgcctagctaatttttgtatttttagtagagatggggtttcaccatgttggccaggctggtctcgaactcctgacctcaggtgatccacctactttggcctcctaaagtgctgggattacaggtgtgagctgctgtgcccagcctcgatagtggcattttcaagcactgtgaggagacctttgatgctggagcttgggcaggaatgggagagccctgagggcagggcagccagaggactagtggctagctacatgggtgagtggatatgctagcaagtgtggatgtttttcatgtcctaggacaacttctccaaggacatccacatcaggaggggttttctaactattaaacctgcagaagaaggagtcaggagctgctcatctttggaagtgcctagcagtggctggaggacctgggatgccctgagggacagtcagccaggtaggacacctgccaggcagctgtgagcctgagactttccttccacgcagagcagattccagagccccccaagcaggagctgccgcatggctgcatggatctttcaccttctcagactgtccccccatgacttgggaaggcataattcttgtggttgaataagaatgaggtgaacgacagaggccccagaagccacctaagattggagggccccaccctcctgctggaaacatctacaaggccctttccccatccttccagccctgctgacttgcttcttgggtgactccatggttttttgcctcagtctaattatgctcaacagtggcacacgtcagtaaaaaccccatctggctctcacatcacaaaagactgtatacgccttgaaacttaatctgtgctgagctgagcacatgctgctaaatcacaggcccccgaagagtcaaggtgacatggcaggcagagggaagaccagccgtcagaaccctcagcaccacggggctacatttcacctttagttgggaggaaactgaaggcatgctttctggtttatctggatgttcagaggaaatgagggaggtctggaaacacacattgagaccaaccctgtgccaggcactgtgtaagaagcacttcccccggaaggcattattgcccagcaatttacacttcatttctgtttgatttagttgatgaccctgtgaaatagaccacaagtcacagattcactgtctaagaatctgcaggccttgtaagcccccaaaatgcttcatgggacaatgttagtcacatgtcgaactggcgctcccaacttcagaacctccctgtgcctttcctgacctcataaaagatttccaggggagagaaaaccccaggcaggacaagaagtttgtggaagcctggattccagaatagagataaatctgatgtcaaaaaaggtgttttaaatttttttcagtgagcaggtgggtaggtgggtacagacatgcccttactttctgagtaaatgctttttgagaatctgtgatgcctgattcctgagctgaacattagagaaacagtgctggtctacataaggggaaatatatttctaaaagtgtggaatcgttctcatttataaaatgcttatatttgatagttcaggatttttgctttttagggtttcactaaaatttaaggttaccaaggattagaattctagttagcacataattctatattcaaaatgtgccaaaagatgtgttattagtgagagaaaaaataattttgtgtaatttagaagttatctgaaagttaattcaaattatggactttattttattttatttatttatttattttttttaaaattattattatactttaagttttagggtacatgtgcacaatgcgccggttagttacatatgtatacatgtgccatgctggtgtgctgcacccattaactcgtcatttagcattaggtacatctcttaatgctatctctcccccctccccccaccccacaacagtccccagagtgtgatgttccccttcccgtgtccatgtgttctcattgttcaattcccatctatgaatgagaacatgcggtgtttggcttttagtccttgcgatagtttactgagaatgatgatttccaatttcatccatgtccctacaaaggacatgaactcatcattttttatggctgcatagtattccatggtgtatatgtgccacattttcttaatccagtctatcaatcattgttggacatttgggttggttccaagtctttgctattgtgaatagtgccgcaataaacatacatgtgcatgtgtctttatagcagcatgatttatagtcctctgggtatatacccagtaatgggatggctgggtcaaatggtatttctagttctagatccctgaggaatcgccacactgacttccacaatggttgaactagtttacagtcccaccaacagtgtaaaagtgttcctatttctccacatcctctccagcacctgttgtttcctgactttttaatgattgccattctaactggtgtgagatggtatctcattgtggttttgatttgcatttctccgatggccagtgatgatgagcattttttcatgtgtcttttggctgcaaattatggactttaaaaaggggttatttattaaaaaaggtaggaaggaaccagtaaataggggagagagatgtgaagaacattatgtgtatgaagatgtgtttttggtaggaaaggttgtagagacaataactttgtatgagaaaggatcttgtatggtaaatgcttgtcctaaagtaaaatgcctggttgtttaaaacaagggatgtttaggacaagtcagagagtccaagcatgtcatagatggtctgtgtaagtcatgaagaggacttgtgtaggaaaagtagaatatacatttgataaaagtcatgagaatgtggatttttgcctaagttttgttaaaggattgttttaagtgagataggaaaaatctagaggcttgaacaagttgtgtaaggtttattaaaaattaattataaaagagattctgtgtgtgaacatattggctaaagttaaaaaggaaaactggtaattatacttcacccatatgctagcttgcaaaggatacaagtttttgctagtactagtagacacctttattatttattggctgggttgaaacttaccttaccggaacagagaaggctaatgaagttataaagattctcttaaaggaaataatccctcagtatggggtaccctaaagctgccaaagtgataacagcctgtcttttgtctcctagaaagctcaaggggttgctaaggctctcggaatcaaataccatttacattcatcatggagacctcaatcctccagaaaagtggaaagagctaatcaaactctaaaacaggttttagctaagctatgtcaggaaacatcacaaacttgggtcagcttatctgcccatagccctcttaaggatccatagttcccctagagcaaaaattaatatgaacctacatgaaatgttatatggaaggccatattaaactaatgatttattactgatccagaaatggccaggctaataaaatacttagttagcctaggacaatttcagcaggctatacaaaagtttggaactcaaagactgccgacaccaggaactaaccagcaacccaaaatcaggccaggagataatgtacttgttgaaacatggaaggagggatcacctgctcaaaaattgcaaaccaaatggaagggaccattttcagtgggactggtcatgccttctgtggtcaaagtaataggattagatggttggatacatctttccagggtcaagcctgagacacctgaagccctggacttggaatctgaagctgtcatcagccagtacacctatgaacctgtggaagacctgaagtacctgtttaaaagacagccaaaagataagtaaatacttcccaaatttccttggtgtctttgttgcatagttgctgtaggctggataatagtagccattgttatatttttacaattaatttctttcctccaaacagatagaatcacttcctttctaataattaagcaaagtaaaatgttgtaatccatttttgtaacaatcattcctgacaggataggtatccatcaccacccctaccccaaagttcccattctatagaacaaaataacaaatatgtattttttgtgttccataatagtcacccatagcctgtgtatactgggaccaggcatatgggaatcaactttattttacaacagcttctctttagctctccatcagttaatggattctgggtatttattaagaactttacatttaatggaaagaatgttaaataccaccagccccactctggcagaggactgttggctttgtttatctccatcatcatcccaatactttgccatctcaatcccagcccaatcttgggcctttgagaaaataacctatcattcctaactataagggtggaactcccttcaaattaatgagcctggatgacttatatgacttcaaaattatgtaaatgacaagggttagaatgacagtatgagtagtaaacctcctccagtcccatcagaacaaactttctggggttacgtcccattagaaacccatttggtggccaatatcaatgtacacagaactaaaattccaggtgccactttatattaagagaagccacaatttttgtcaggccctggaaaccttgaaaagtcatcgacacaactgcaccctggaaattaatccctcacataatcatgtaagctatgcagttacccaatcagcattatttagaaaacctgtatggttttcatggaaatcattctgagttaaggacactttaaaggatatacagtctaagtactgtcaaggtaggcccactagctgtgttcacattttccattgggaagactgtactgatcctcagatatctggttgccttttgatttgccggtatgaaaatagctttgggtgattgttggaggacactaagtgtaactaactccattcggaaaacagaactgctggggcaactcgggatacttcccaaggtcctttccagcctttaactggggccatcttagcagggaccttaactacttggaaaaacaaaaatggcaagctaacccacatgttcatcatagaaaacaatttttgtcttgaacaacaaggagctttttttcctgcgtggaactggttcctacttatgtttaccagccaactggactggaacctgtacacttgtttatttagccctggcaattaatatagctcccaataaccaattcctcattttacctttgactgcaactgccaggcacagattaaccagtcaactcatacccttttggtagggctaggcgtaacagctggaataggaacagaggttagcgggcttgcaacttccctatcctattatcaatgcttgtccaaggattttatgaaaagcttggatggcattgcctaaagtatcgtcaccttacaaaatcagatagacttcttggcagcagtcactttataaaataggaggggactggatctccctaatgctaaaaaaggtggcttatgtctttttcctagaagaagaatgctgcttttatgtcaaccaatcaggatttgtaaggaatgctacccagaaaaattagctgactgggcctctgatatatgacaacagctgtccaagtcatggcactcctgatcaaaaatgctaagtttggggttcatgactccttcctctagctggcccttcattaatgatgatacttcccttggttttcggatgttgtttgttaaatctcttaaccaaattcatttcctcttgcctggagaccatcaagctgcagataatgatgcagcaaggcttccaggtaaagacaccacccctggacatcaagaagctagcctctctccactagacagagcagggcaggatttctgtgatccccaataggtagggactgcacccaattcaggatgaagcagttacagaagaaagaccgtcagtctctctgcctgccgtgaagactttatggggatcacatctctcatgggggagaaatgaggcaggaaaataggtactgggggcagggaacctaaggccaattcacattgacttcctagaactaaatcaaaaggaaaaacccaactttccacataacaaaagaatagaagctactccctttgcaatccccaccccctttctgcatggcagatgagaaatggaaagtacctctgatggcttccctctcacaaccaatcagagtggacacgagcctagttttcatttgcataggggtgtaactttgtaactttacttcagcctctgattggtcccctcccacaaccagtcagatgtttgcgtagggtataactttctaagttcacttcagcctccgattggtcaccttctgaaaccaatcagactggtcacaggccactccttcatttacatagaatgtaaaccaagtaaccaatgggacacctctagaaggtatttaaaccccagaaaattttgtaacctgtgatcttgagccacttggtcgagactgctcccactttgtggaatgtactttcatttcaataaatctgtggttttgttgcttcattcttttattgctttgtttgtgcattttgtccaatactttgttcaaaatgccaatgacttggaaaactcgtagtcaagaccctccactgttaacgggaggaggattagagggagggagaggaaaggaggaggaggttaaggaggaggaggaggtatggacagagggagagaaggaggaagaaagctgagagacagagagtgaagaagtggaggtggaaggagggaggaaggaggagagagaagaataaaggaaagagtgaatgagtcactgtttctgggttgtgggactggctgtggttgtagcttgcctgtctccctgtctctggccccttaggccaaccacgggattcctggccccaggatatttgcagcactggtgtttggaacttcttactgaagtccattccagaagttctccctctgaccccactctctgcttctgtggcccccagtcgggtcctgcttctggcctgggatttcacatttagatcttttgtccagtgactaaacctcagcatggcccagcaactgggggcctggtatctctctaggtgcagtgcccatcgcggctgctcctgttctggggattaggcggccactgacctgtccccactggggccacctttcggggtctttgcagcagcactgtgctctcaggtttctggaagagggtatttcggcagagataacagaatcggccagcagtacctacccatgttttccatccaataagccatcaccttccaattaccataatgcctgtaagtgtaacaaaaggctcattctggtgacaaatgtggccctgcactctatgtcccttgaaggataaaaaggtgtctcaaattctagttatgaattctgtcactagttctaataaaaacttgcaataattaaattagaagcagaatatagctttttttaacataaaaggagaaacaattttctgagataagtcaattcaaaaaaaatgtaactgcttgtcctatgtatttatgaagtagaaactcattttcccatccaattttagcttcttatttcatgttgggtaataggtacttctgataagaacaacaccctctgatggaaatgtgagtattgtcttatcctcaagttctcttcagacccagatcaaagatttaaaaaggtcattaaggtttgaatatttcactcaactgactcaggctaattacagacggagtggtggtttggcagctaactccatggttccccacctttctgtgtccttctttttattttttattattcttacctaaatgctgcctaccctttacaaataatttgaagatctcctcctccaggaagcctccagggattgcctctggatggatggagctttgcagctggtcaccacttgcccttcaacctcctgtcgacagggttgtcctcaggatgggtcaggaggaaaacattctccatgtctgtcacccgccttctgtcacccaccccctgttattaggctgttcttacattgttgtaaagaaatactggagactgggtaattataaagaaaaaaagtttaatcagctcatggttctgcaggctttacaggaagcatggtgctggcatttgcttggcttctagggaggcctaaggaagctgatgatcatctcggaaggtgaagggggagtaagcacttcacatcatgaatgcaggagtgagagagagagagagagagagagagagagagttgacggggaggtgccacacacttctacatgatgaggtctcgcaagaactcagtcactatcatgaatatagcactaagccacaagggatttgtctccatgatccaaacacctcccaccaggccccacctccagtattgggtattccaattcaacatgagagttcagcagggataaatatccaaatgacatcatttctcccctggcccctcccaaatctcatgtccttctcacatggcaaatacagtcatgccttcccagtagtctcccaaagtgttaacttgttccagtattaactgaaaagtccaaagcccaaaatcttatgagacaaggcaaggcccttccacctatgagctggtaaaatcaaaaccaagtaatttatttccaggataccatgtgggtacagacattgagtaaacattgccattataaaaggaagaaatcaaccaaaaggaaggtgctacaggcgccacacaagtctgaaacccagcagggcagttattaaatcttagagctccaaaataatctctcttttttgactccatattctgcattcagagcacactggtgcaggggataggttcccatagtcttgggcagctccacttctgtggtcttttcatggatcagccctgactactgctctcacaggttgagtgcttatgatttttccaggtgcatgctgcaagtggctggtggatctaccattctggggtctggagggtggtggcccccttcccatagttacactaggcagtaccccagtggggactctgtgtgggggctccaaccccacattttcccaccacactgccctagtagaggttactgtgagggctctgcccctgaagcaggcttctgcctgggcacccaggttttctcatacatcctctgaaatctaggcaggggctgtcaagccttcactcttgcactctgtgtgcccacaggcttaacaccacgtgaaagccaccaaagcttacagcttgcgctctcccgagtagcagcccaagctgtatctggggccctttgaatcatgactgatgccatgactggagccacagcagctggaatgcagggagcactgtcctgaggctgtgcagggtagcgggggcactggctggcctgtgaaatcattcttttttcttaggcctctgggcctctcgtggcgggggtgctgcctggaagttttctgaaatatctttgaggacttttccccgttatgttggctattaacactttgctcccttttagttaagagtaaatttctctatcgagtggttgctctataaccaattaaatttctttcctgaaaaaagctttttctttcttggcttcatggccaggatgcaaattttccaaacttttatgctctgcttcgtatttaaatataaattccaactttaagttatttctttgctcccacacctgagcgtaggctgttagaagcagccaggccaattcttgaatgctttgctgctcagaaatttcttccaccagataccttaggtctcactctcaagctcaaaagtcaacaggttcctagggaatgaacccaatgcaggcaagttctttgctaaggcgtaacatgtgtgacctttgctcaaattcgcaataaattcctcatttccatctgagacctcctcagcctggacttcactgtccatatcactatcagcattttggtgataaccatttaaccaatctctaagaagttccagactttctttcatctttctgtctttttctgagttctccaagttcttgcagcatatgcttattacccagtttcaaagctgcctccaaaatttcagttatctttataacaatacctcactcctcagtaccaattttctgtattaagccattctgtcattgctataaagaaagatctgagactggacaatttataaagaaaataggtttaataggctcatggttctgcaggctgtacaggaagcatggtgctggcatttgcttggcttctagtgagacctcaggaagcttacaatcacggcagaaggtgaagggggagcaggcacatatggcgaaagcaggagcaagagggagggtggtggggaggtgccacacattttaaacaaccagatgtcatgagaactcactcactatcgcaaaggcagcaccaggccatgcgggatctatgcccatgacccaaacactcccagcaggccccacctccagcactggggattacagttcaatatgagatttgggtggggacaaatattcaactttatcagccccttcacaagaaatccatttcgaagaactgactaggtcccctccccctaggcttgaaatgggctgggctatcctctgccagtttcaggccccagcttgggttggggatgaggacaatgggtagaaagacaggagaagtggagggagacaggtgggtctgagtaattgagtgaaaagtgattatggaatatttggtcactggaaaacaaagagagacagagagaggatcagaaaggggagacaactaatgacgcaaggcactaggtttgggagaatcgtgtgggattggaagtttgagaggaaaatgttgggagagggggatggatagaaagaatttgagggcagctacagggtgtgggacagaccaagagtgagtggaatagggatttagaaataaaagccttactatgggttatgaattgcattctctttgatgttctttgagagactccaacaaaaaatggaaataatctaaattttgtttgagcattcagaggtgtgattgtgtgagcctgtttctttatgtgactccacgcagagactgggccccgtgatgagccctctcctgtctgggttcacgctgttgttcacatggtgccctgtgtgcatagcatctggagtcagaagacctggcgcttgaaagctggatgcaagatgttgcaaaagttacttagcttctttaagcctcagtttccttaactgtaaaatggacacactaataatagctttctaatagggctgtcttcaaagcaaactgagataattagatgtggagatgcaaggttaggcttatcacactgtaagcaattaattattaatagatctttatttctttgctttttttttttcattcatcccctgatatggtttggctctgtgcccctacccaaatctcaccttgaattgtaatcaccataatccccacatgtgaagggcaggaccaggtggaggtaattgaatcatggaagtggttttccccaggctgttctcatgatgagtgagtctcatgagatccgatggttttataaacatctggcatttcccctgcttgcacttcttcttcctgccgccttgtgaagatgtcttacttcctctttgcctttcagcatgattgtgagtttcctgaggcctccgcagccttgctgaactgtgagtcaattaaacctctttcctttataaattacccagtctcaggcatgtctttattagcagcatgagaacagactaatacatctcttcatgttacgtcttacaaccccagctgttgcgtttgctctttgtagaaaggactgtgtcctctgagcccaaccaggatggcatacatttctggagctccaggaggccatctggggtgagtctaccctgtaaccccagggggctctttcacatgctgccccaagaggggcagcctgtcatgacccaggcacagatatgtgtgccctgacacccagcctgttcccttgaaggggtttctgtgtgctctatgctaagccttgtctgagtttcttgaccctggctgtgagtctcatgagcgagccatgagggtttggcctgtttgctcaacccctagaaagaggacatgtacaagtgggctttcaccgaacgtccctgagcagaatcagaatcatacattcataatcatatttaattcctcaacaacaaaagagacacatttgtctcagggctaagtactaaaaaatgcatggagcaggagaaaatcatcaacaaaaatttaactgaatgcccatgactaatgatttatttaaggtgttctggcttgattacagctggctgtatttgaaaacaaccagcttgtgtgggaggcagagtagggggcagctgtagggcagcctgggcctggctggtggactgaggcccccatctacaagccaggcaacttgggcagctccccctctgtgtatgaggcactgaggtgttgtgtgcaaaatgactggcaccaagctagtgctcaataaacgtcacatactgttaccgttttttgctgtagtcaggagtgttaatgccatttgcttctcctgaaaataaaatcttaattttttgtactccaaaatgacagataaatattttatttgtttgatactgagtgttctgcatctgacatcctaatgaacactgaacatatttccattcactaatgctgttaaaagaaccacaggcttggttttgcaaaaagatgtatctttgcaaccaacagacttacccattactgcagagatgagaggactttctgctgtttgaatgtatgcattaaccaaaaatacagaagcgagtgtgaccttgaatattagcattgggaacaacaggtggtcgtggacataaagtcttacccacagctaggggcaaagggcatgctacgaacatttcattgaacataggatcacaagcatgcacattgtcacattgtcacatggaagctatttgcagagggaaaagtggggacgagggtacaatgacttggacagagaccccacaatctatgggaaggcctaagattgtgaggtagacacaaatgccttctccttctggctattttaagataagcattctgaaaagcacacatattgactgagctctatccaataatgatgaaaaatacagaccaaaacacaacaaggaaaaagaaagtgatcagaggtgtggtggttggtgagtgtttggcttctctacctgttcatcccaaagcccactgctggtaattgctgctgcctctttgatcccagacaaggaataagggccaggcctgatgctcagaagaagccaaggtggcctctcttaacacaaaggtaaagagcatgggtttgagccctcttgtgcaaggtgctttgcaaagcatgactttgcatatctattctaattttatctttgcaataacctgtgggatggaaaacacttccacccatttcacagatgtaaaaaatgaggcccagcaggggtaagatgctctcaatcacacagtgtcaaagtttcagcctctgggagtgcttgttcctccttgtgttggtctgaaatctgatttcccaaacttctgcccacagtccaggcttcctacttgctcagcacatgcctgacctatcctgggggacagacctttaggtggccaaagatggcactcacttccctgcagcagtttccttccatcattgccacatccttcaagcatccttcatgcatctttcccacagcctggctttgagtctctccaacattttattttaaatctacctccagctgattgatatcactctgcaaaatttagtatttagaacctcatgccacaccacgacctggttttaaaacacctgaattaagtttacaatgatcaactgtattaactctgtcgctagggttctcttattgcaagctaagtttgtgccagcattgtcagcagccaataatagcatgaacttacacggagatccttgtgcattcattgggtcacagagcgctgttgggtacctcctacacaccaggtcttggtctctaggatataatggtgagcagcagaaaattcagatgcagagcagtagggagggcagaaaggaaggaaacaatcaaactagtgcgtgtcaggttgccactctgtgtgtgctgtaaagggaaggacgtggtgcgctcatcgtgtaaacaggcaggcctggcgtggtttgaatggggatggtgagaagacactcccctaaggaagtggcatttaatctgataggtaacgaatgagaataaagtgggtgaagtggtcaggtggggtggctcacacctgtaatcctagcactttgggaggctggggcgggtggatagcttgagcccgggagtttcagaccagcctgggaaacatggtgaaatgctttctctactaaaattatgtaaaaccagctgggtgtggtgatgcatgcctgtagtccaactactcaggtggctgaggtgggaggatcacttgagcccaggaggtcaaggctgcagtgagctgtaatcgtgccactgcactccagcctgggtgacaggaatgagactctgcctcaaaaacaaaacaaaacaaaacaaaaaaacctgggaagaggcaggagatatagagggtggagtgtaataggagagtgttccaggaagcatgtgcaaaggtcctgaggcagggaggagctttgtggtgaaggacataaggaagagtggctgatgttcagagaatgagcatgttctgagtcaggaatagagaagctggccccagggcagccatgcaggagcttgtcagacatggcggggggttgggcctttattctgagagtaataagaagtcactgaagaatttcaggcagaggaatgaaatgatgaggctgcagcttgaaaagctccctttgcctgctaggtgtagacgggaacctcacagggcaagaaagctggtaggaaggctactgaggcaggggaggggagaattgatggggtctgtgagggaggtgtgagtgttgactgatggaagatctggggcatgagctccttctcatgatggagtccacaggctggccccagcagttaccttgcaagctggagtaaagactttggaccaggtgctctcttgggtggaaacaagacccaccagaaatggtcctactggttcaccacctttctctacttggaaatcagctagtaaggcaggattcccccctttgacatgcatgggccaccttcatcagtggttaagaagaaaaggtaacactgggacctgaactcgcgttatttaaaatgggaagtttgaggggaggcttcgtgccaaacggagcaatatttgttgtaaatggtgcatgcgctgtatgtggcaaaaggcattttttgatgtcagctatttctttgaactctgaagagccctacctttcactggcttctgtctagcaagccaccccttcagtgtcctgagcacaccttagatcaaagcccgctgcacccaggccttttttatgttccttttgcacaggtgagatgaaagttgctgggaatggggatgtcattccatgagccagatgagaaatggggggatgggcatctgcgggagggtccacagcacagtccccaggaagacagcagctgtccccttttctctccagtgaccagcatttcaccaggggagaatttgggctcaaagttttcctgtttggggtgggacacagaagcccaggccaccctttcaagggcataacgctgtcaatttcttaaccctatttgtcacactcatatggatgccataattagttatttaattatgatgtgtaaaaccagaagctaacgaggataaaatgatgaaagttaatcattttgccaccccaaggtaatgagctttcatcctgtcctcagatattggggttggaaatcagattcttgtaaaacgactctctgtgggctgacttcaaaatgtggggagtgtctatgacatggctcctgtgtcacttctgagggacggagggaggcagaattagaacaacacaacagtgagcacaggcaaagagggggaggtgcctggtggtccctctgtgcctggcgctgctccaaggacatgactcccatgaccggcagtgagcagtcaattccgtagtggcaccatcaccccggtgaggaataagaggctgagatgcggacaggagcggtggctcacgcctgtaatcccagtaccttgggaggccgaggcaggcggatcatgaggtcaggagatggagaccatcctggctaacacggtgaaaccccatctctactaaaaaaatacaagaaattagctgggcgtggtggagggcgcctgtagtcccagctcctcgggaggctgaggcaggagaatggcgtgaacccgggaggcggagcttgcagtgtgccgagatcgcgccactgcactccagcctgggccacagagcgagactccggctcaaaaaaaaaaaaaaaaaaaaaaaaaaggaggctgagatgccaagtagcttgtcacatatcacatggctggaaagcagtggaggcaggcgtgcggtctggttctgcatcccagcttttagaaggtctgttgagcttgcatggagtaaaaaggtgctctgggacacctgctatcaggaagccaaaggcaaaactgcacagacatgctccttcaaccagcgcacacggcaaaactcaggccactttggctgctcttacttgttctctataaaatgtttgtactttataacagcggtccccgacctttttggcaccagggactggtttcttggaagacaattttttttttccatggaccagggcagggggatggtttgggatgattcaagcacattacatttattgtacactttatttctattattatattgtaatatatcaagaaatctacacagctcaccataatgtagaatcagtgggagccctgagcttgttgtcctttaactagacggtcttagctgggggcgattggagatggtaacagattgtcaggcattagattctcatagggagtgtgcaacctagatcccttgcacgtatagttcgcactctagttcatgctcctatgagaatctagtgctgctgttgttctggcagaaggtggagctcagttgggaatgtgagccatggggagtggctgtaaacacagatgaagcatggcccgctctcctgccactcacctcctgctgtgcagcccagtacccgtccgtggccctgcgattgagggcccccgctttataaagaaccttacacttacttcactgtaaacacaatttgaaattctcattcttttaaaatacttagttctcatactttaagatatgtaagtttgacaagtgatcaacttttgaaaaagcagcatttaggtgtttggaaataaatggcatgactgcaaggtgtttagccgatgctgtttcttagtgatgcctgtggaaatagctatgttagattgtaactgtttcctgtgtctgctgtaacaaattacaaaaaatttcgtggcttagtgcaacagaaactcactctcccacagttctgggggccagaagtccaaagtcaacgtgtcggtggggccacactcactcctgaggctctgggggagggattttcctcacctttcctagcttctggtggctcctggagatccttggctgtagtcaccccctcccatctctgcctctgccttcacattaccgcgtcctctgtgtgttgatgtcttctcctctctgatcttgtaaaggacatttgtcactggatgtaggggccacccaggtcatccacgatgatgacatcgccagacccttaacttcatctgcagagaccctctcccacataaggtcacattcacaggtgctgggatgtgaacagaccttttcttggctcggggagggggcagcattcaacctactgctgaggtcatttgttcaaagcacttagaacaatggcatcaataagagctcaaggaatactggtggttgctattaatataatagtaatgattattatttcctagggtagggtttgggaagcctccaggccttttggttaaaactgaactgatgagcacagagagtcagtgcaacaggtgggggaaaggcctgggagcctggcggcccctgctcccaccagtaaggctgcctgtccgaggggaggcctgggggctccagcctcatcccccatcagcacagcgagaacagtggtttcttgctggggattgcagtgtctgcctttcgagtttccttggagcagatgttctgagagttcagtgttttccctgctgagaagcccagggctctgaccctgccaacatgctcccgagattcctaaacacagcactgattggaacctgacctcttcacagtgcagaggatccttgggggctcctgctctttagtaaaaacacagctcgcctctcattttccacctggagctcctcacccgcaagccctggtggagctgctttgaggatggaccagagcctcattctgtgatgctatcatttctgcatccacagattcactgcactggccatacacatgctcggctgccgggggaccaggaatgcagggtgcgggctcctgacctgtgtttctaaagtctgctcattcacccctcgcccagtgcttctcatgctttcaaggaacacacaccctttcaagggtcttgtgtgtgccaggcaccctgaacaggcccagccccgcacttaatgagctactcacgaatcagaggacaggatggtgaagtgacaggcagtcacactgcttgcaagggggtgacatttgggggcaggaggctgtagggtccatgaagaaactccactgtaggttgtggggtcggaggaagccgagggctaaaggatgagtatcacctggagagaggaagaggtttccattgacctggagagaggaagaggtttccattggcaagtggtactggattcctgtttgctgtgggagctgcctgggtgttgtaggatattgagtttaggcaaagccctggaggcagcagatagcaggtgtgtctgtaactatgtgaccccagggaggttggcgcccagtgggcagcctggggagcataagaggaggctgtaggagcaaacaagcaggcaggatcctggagggcccataggtactgaggagtgtgggctacgtgtttggagcaggaaagccacatactccgagcagccttttacaatggcccacctgctgtactgggaccttatcactccatgctgggctcagattaacaccagtgaaaaacatctcaagatctgctcctgtgtggtttctcctggtcagtcacccaagaaccagccctgcagctttctccactggcccacggcacagactccagagtggccgccgcactcgccctgtatgggccctgcagcttctgtgccatcacttccccgagctcactcacaccttgcaccccagcaccgggccacccagcaccgtccacactgtgcagtcgtgtgcttcccgagagttggttatatttgttcccaaacctgtttactccagtcgtacttgctagtgtaaatacaccctgcaattaaatattacataaaaaaatgaacatctgagtgcaaataagaaggccgtcgcttctataaataaaggttgaatttttggaaagactcaaacaaggcaaggtactaaaactttcttcaaatttttttttctgtgaaacagcaataaagcactgagggaaaaataagtcaaaattccagctgatggctatacctgctgctgcttcaaattctcttcatgttctctcgccaggataaacaaactggaggtggtttcatgggtgtggcgcatgcgaggcccacagcagagggcaaagggtttatctttttgtttggttttgtttctcaaaggttggtaaatctacacctgcaggcatgtttaactgttttatgttacagtatttaagatgcatcatctttagcagtgtctcctgttgtattgggtaagagggtgtgggctgagaatgtttgtggtcaggaagaagagggcacccctaagagctcagggtggctccaagctccatccatgtcttggtctgtaaactggaacaccagtgacagtttctacctatgagacagccgtgtggaaaggtctcagccatgcctggtacatgatcagcaccccagcattagatgttgagagaacaaaaaagtatagaagagaagtgaacatttattcctctaggaaacaagcaaattacttatatatataacatatattagatataaattatatctaatatatgttatatattacataattatatataatttatatatatttatacatatatagctatataattatataattttatataattatatataacataattataaatatataatacatacatataaaatatatgtatgtattatatattatgcatatgtgttatatataatacatacgtaaaattatataatatatacatattatatataaaattatgtataatatagttatataaatattatatacatattttttatatatatatataattttttcttttttctttattccttagagaatacctccacagatgacttacatttcagtcaattttaaaaaataatcctgaaacaatgggaactcacttcctgagggagaaaaggaagagtagacagaacaagtcatatgctgtgattggcaagcctatgaggtgtctgaaaggtccccaggatgactgacaattggcctcttgaaattaaacaaccatatcctgccgcctgggcactcatgcaccgaggcatgggtatgttttgcatgcaaggcctgccctacaaagtgtctagtaagaaggcattatcttttaaaagataaaatacagctcaggtagattaactttttaaagctccttctgtgattttatattttatatatatatatatatatatatatggcattgaaatgaatgagggatttacagaagcacataaaggggcacattttcctagtgcgtcattgagatttaatgcaaaggagtggaccctggtggagggatgcaggtgaaaagtgctggtttcccctcttagggtgactttttcttgcctttttgaatgcaactgagtttggaaaaggagctatggggtctccaaagtggccggacctcctctctgagtatgaaggggatgctgctgacagcactgtcaggctgttgaccattactttgcatctggtgtgtagggtagggtgcaaaaggccaactgttgctgagtggagtggacactcagtccaattagagctctccgagaatctgtttgcagccaactcgcaaagccagctgggagagtctgtgcagaatgattcttaaagtgattgctcctctagagggaaatgtgatttcagtgaccacatttagggtttgggtaatattgacatcgttttatatataattgtgatgatatcatttcttaccatacttaaaaaggacttagagacactggctgagccacttagctaggacatccctcccttctccctaactgcacctgtctctcactttgaagttcatatctcagagcaagaccacccactactccacctgttgtcatccacagatgctctggtccctccccttatacgtgaaggggattgcagccacctccctgcactttcttcatataactcctgctatattcttggtgatttctgtgtctttttgaatgatcttttcaatatcccgagttctcagttttgtgacctcctctcctccaaagatactgtatttttccctatctcagtcactcagtcccatgggtcatattctagactatggattctcaaccttggggagctttagaaaattccactctgcatgctgtgccccagatctattagagcacagtctattgggatacgagctgggcatcagcattttaaaactccccagtttacttcattgggtagctaaggtcacgaatccctgctcctcactgcatccccgttggagctggatgtccagtgtccttctctccgaactacacctactccttttccggctcccccaactccaattcatcaatttcatcatgacctacattcttctcacccttttcagctctcagtcccctttgcatcctcacttccttcctcatctagtttagactccatcatgcaatattaagatcagtcccacgaagacactctcagctgtctctcacctctgttgatgccattaatatggcaaggtctaagcaggtgaaatccaacctcccacttatttcttcctgcacccaggcaggtaaatatgtacacacacacacacacacacacacacacacacacagacacacggacacacacagacacacacacacacacacaccactcaatgttctgtttttattttaaatgcaaaaccacagatgagtcacgagtctttggttctgcccatcaagcctatattattccctaagtctgcccattatccactatctgagatgacgacttcacacctcctccccttctcgagccatttaccccttgtctactgcatctgtttctagctcttgacctcgtttcctatttcactaagaaacaaacactcataattgccacatatcccatcaacacatccacccgtcacactcctctgagccccaagactctgcctccctgtccccaagaccctcagagaccagatctccatgtgtgcactggcatctatgcctcctgtcttctccagcacagcaccccagggggtttgttttctgcatgtctcagcattgtgcttccttcatcccttaaaatatgcagaaacatctcttaactcaacaaacgtgcaccagaaaacctcccttggtttcaatgccccttttctcatcgcccaatttctctacacccctttacaatgaaacacatggaaagtgatctcagtattcatcgcctcccctttctctcctcccagtctctcagggatctctatggtcacacttttgtgcccaccccgggagatctccaatgccttttgcattgcaaaatttagtgatccattctcaaaagcactgaccagttaatattgcattccccttcttgactttctcaacctggcttggaggcatgatttttctcttctgtaagttttccttctaagtccgtggctagtacttctaagatgttacttcgttttgttgaatctctctcatctctctgccactaaatgttagaataccctggggctcggtctgtgggcctcctctccatctgcacacactctcttggtgatcttctagtctccacatttaaatgctctctacgtctctgcttggatgtctagaggccatttcaaagctgacatgtctagagtggaagtcccaccccaaactttctctcctaaagtctttcctatcttaaaatgttctaggagatttaagccctgtccttacaggtcctgcagccagaaatacgattcatcctcaactcattcttctctgacacctcacactgaatccatcacaatgccactcagctcaaccttcaatatatgttgagaattcaacctgcctgatgtctagcctgcatgtggccttctgccctggcctggaaactggatttcctgttcctgctcctgccctgccaccacctcattgcctaaagtagccagagtgaatctgttaaaaggtagacggggctaggggtggtggctcatgcctgtaatcctggcactgtgggaggccaaggcgggcggatcacttgaggccaggaatttgaggccggcctgactaacatggtgaaaccccgtctctactaaaaatataaaaattagctgggcatggtggcacacacctgtaaccccagctacttaggaggttgaggcaggagaattgcttgaacccaggaggcggaggttgcagtaagccaagattgcaccactgcactccagcctgagtgacagagtgagattccatctcaaaaaaagagtagacgggatcacctcactctgcttctaacccttcagtggctcttttctcactcagctggacacatgaaaatataagtgaaggaccttgtaagccatgccaaagggcaggctcttgaggctggagaactacagggcaaggggagataaaagacaatgagaataataatgaaaggaacaggtcatgcggccagtaagcaggtgctgaaggttccagcctcgtccctctgatatcagagcatgtgctttattcagttcactctattgccagccagggaaaacttcttagggcagggtcaccgtgcagtggggctttggaggtcacaaaggtgggttggttgtaggggagagagagtagcacggcagatgaagaaaatctcattgagtatattctagcctaggaaaagccaacacatcaaaaatacagagagtggctggaataggcaaaggctaggaatgacctctggtctttgctattttgtgccaggacctctgccctccgcccgtgaatggggtgaaggtgagggactgagactgtcaatgcaaagctactgttgctcttaaagagcttactgtttggaaaacttgccaaaaacctccaagaaggttctgaactggtaggtgtcaaccttgcaacacacagtttggttcaaggcaagtcttgtacaagaggactcattgataccagaggccaaggcaggagaatggcaggagttcaagactagcctgggcaacaaagtgagacccagtctctacaaaaataacaaataaaatattagctgggcatgatggcatgcttctgtagttccagcttctggagaggctgaggcaggaggagcgcttgagctgggaggccagggctacagtggatgagctatgatcacatcattgcactccagcctaaatgacagggcaagaccctgtctcaaaaagataaaataatttggagacaatatctggctttcttcatacttagcccaaggcaactcaagtgttacatctaaggccgtctcggagttcacttgcatcttttctatctccctacttctggattcctttgaatctagcattaagccaggagtctagattattgattattggttatttcactcattcccacatcttaatcgtagcctcttatgtgcaaggcagctagccgttgggcgttgggagccagacaatctcctgatttttactgaattcccccacactgagagtcccaatgccaagtctctggaataacccttctgatgcagtcatccaaaatctgtcttcacaagggtttctgcaaggcttccctctgcagcttcctcacatctcggctgtatgttgtctacgtgaggggcacaggagatcggtgagaggcatcgaaagtaccagagatgctcactcagagccttagaaatgcctagaccgttcctggtgcatagacagcatcgatattttcgctgctccatttttactgcaacaaatatgaacaacaattaaatccattttcgtgggataattgcctgcaacctgatgtccttgtaagacacattctgcaacttcagtcatgtggattacacagcactatttaaaaccttcccattaccagataaggtggagggaaggaggaaagagccaatccatggccaagtccattcctagattgtccagccttttgtgtctgttattaagcccttcaaaagtacactgcttccctggagagaaaatatatttacatagttcccaatcactccaccagagcagcagtggcctcaagataaacctcccagcaccagggaagaggggattacacacaccacaacgaagtccaattatattgaaaactaacagctaaatttctctgcccctgcagttcctagagtgtgaagagagaaggaacaaacggaagaaaaaaattgttgtagcgccttaatgatgagtgtgtgagaagcagccagttccctgttcctgccgttcattttctgtgtatcggtccctaacgaggattggcaagatctggagattgtcctggtccctcctcgtgccctctttcccttattcaaagcactgtgagcctctcttgcttggttccagttgccttggaatgtgttttggaagaaatgtcctggatagtctccaggcttctttatattctttctttttagtaattaactttgtattgagttctcccaccaaaatgaacagccaggccttccttccagatagaaattgtggcaagaaacaaatgggagttgaaataaataacatcgtgttgcttgataaatgtatttgcagtagcaacagagactgccacccaaggagttctaattacgaatctgaccctgtagagccaatgccacagttgctacagaaaataaataggctaagcagggcctggggttggttatttccatagacttgtcctggaaatgttaatcaaagcaaaccagagggagcagggagccagggttattctgatagtgctaaaaaaattaagttcccggccgagcgtggtggctcacacctgtaatcccagcactttgggaggccgaggtgggcagatcacgaggtcaagagattgagaccatcttggccaacatggtgaaaccccgtctctactaaaaatacaaagactagctggcatggtggtgagcgcctgtagtcccagctacttgagaggctgaggcaggagaattgcttgaacccagaaagctgaggttgcagtgaacagagactgcaccactgcactccagcctggcgacacagtgagactccgtctcaaaaatcaagtttctgttagccctttgcaatctggtcatagttctttctctcttcctccctcactctttctttatggaaactatgcctacctgtgtattttctttgtgaaatatgatttcacactttagcttataaaagaggttttgccaggtgtgatcgctcacgcctgtaattccagcactttgggaggctgaggagggtagataacttgaggccaggagttggagatcagcctgggcagcatggcaaaaccctgtctttactaaaaatacaaaaattagccgggcatggtggcgggcacctgtagtcccagatactcaggaggctaaagcaggagaatcacatgaacctgcgaggcggaggttgcagtgagctgagatcacaccattgcactccagcctgggcgacagagtgagactctcttctcaaaataaataaaaggggttttaaaatttgttgtggggggcggggaggattggtaaaggctaggaaattcatttaaaaagaagacccaatgtttgtcatggcatcttcaacttccaccctcagggatggagggagatgtgcacttggccttttctagttggacaggtgtgcaggtgagggcaggactcctgggggctttaatcggccagggtttgcctggtgcacactgccaagaaggtgaaaagacgcaggatagggatctcctataggcggtaaagggatgggtcaggtgtaagtcatcacacgctcctaagccctgagcaaatcacccaggatccggtggagatgacattgtcatgacaattctgtccttccttctgccttccacgcaccaggtagaggggtagggcgactgtcagagttcactcatgacacagagcccctctgctgggtcaagcaggaagggattcaggaccgggaaacagatgcttacaggtcattgttgaaagtgctgaggaggggctctggctggctccgggttttctcgagcactgtgtagcaaacctgccaggacagcactgactaccacagccaggacagttcagaagcctggagatcaggagtctgccagtggagtcagcacacctgcttttcacctgtgatcccaggagaggaagcagctgcctctgaggcctcaggctcagtggcctatctttaccccaatgcatgcaggtcagaatgtagctgaacagcagcccagggtcctgccctgctgccagcgggaagaagaaaacagccaaagcaggaggtgatcttacctacccctccacctccacctcgggcccaatttgcatcctgagtccctgcacgggggcctgccagggggacttcacatgctcagctgatgcaggtggaggggaagggagaaggctgcctggatgcggggcctgtccaccccttccaccccatacagcatctggttctggtgtgggtcctctcctcctctttctctacacacacacacacacacacgagaaacacgcagtctcacacgtctgatgctgccccacacgtgtcgccaacatcagcctttgtccagcctcagcctctttcctctctgagggtttggccacatccactggcactgcatttcttccctgcaattttgctacgtctaagtattgtctctattatgatctagtttttgtcaccttagttgacttgttaagctgaaatagttatttcaaaaggaaccagttacacagatggaaagccagtgtcatttgtattaataggagataaaggaataattaatacaataaaaagggaatgcatctttatgaaatattaattatcaaaggatctgagtccaaggactgtgctctttactgaaaagataaatgagtaaagtgaggtgtcaaagatacattattctgaaactgagcctttttcatcagatggatcaaaaagcaattacagttgagccttgaacaacagggggcttgatctgcatgggtccccctacatgctggtggtcttctacctccgccaccccagagacagcaagaccacctccacttcctcctcagtctactcaatgcaaagaccatgaggatgaagaccctatgacagtccacttccacttaatgaatagtggaatatgaacagagaaaatctatatgaatagagaaaatctatatgaatagagaaaatgaatagagaatatgaattgagaaaatccattttctcttattttcttaacattttctcttttctagctttattgcaagaacacaggatacatataacatacaaaatgttttaatcaactgttggttattagtatgacttccagccaagagtaggctattagtagttaaacttttggggagtcaacagttacttgtggattttcacttgtgcagggggcggtggagcagttggtcccctaatcccccacggtgttcaagagtcaaatgtgtgaaagggtaatacacattgctgtgcctgccagctgagacgatacaggacaacagtggtcatcagcttatactttttcatttctcatttaatttttcaaactatcctggaatacgtattattcccagtttaagatggggaagttgagatgcaagaagaaattggacacggttccagattgaggaagtgggggtgctggacctgtacccagcttcttgacctgagtcctgggggctccatatgaatcagaagggggcaaccgtgtgtcaaagccctcagctcccagcattagactcatgcttacgacatgcagctttcacccctctttgatcaagagagggtttcttctgtaatgtttcccccattctgagatctcaaggcagtttacctcaagggacatggtgatggctcttttcaatctctgggttggttctctaacatgaaagaccacatggccgggtgcagtggctcacgcctgtaatcccagcactttgggaggccgaggtgggcagatcacctgaggtcaggagtttgagaccagcctgaccaacatggagaagcccgtctctactaaaaatacaaaattagccaggtgtggtggtgcatgcctgtaattccagctacttgggaggctgaggcgggagaatttcttcaacccgggagtcagaggttgcagtgagccgagatggcgccattgcactccaccctgggcagcaacagtgaaattccatcttaaaaaaaaaaaaaaaaaaaaaaaagagaacacggagagcatgaataagtggagcctacactgcagagatctgttggatttttctgggaatggctttgccttcataaacattttcctttctcaagtgtcagggacagggaatcaaagcggcacatgctgacctttctccacaaaacggaacctcccggccccggggccatctgtctccattgatgcacggcagctagaaagatgaggactcagacctgggaagtctctcagagcagctctctggcaggcctgtggctcatttttaattgctcagcagtgaaaattatagaggagaatagaatgtctgccctggcagttggacgattttcttaccagtaacctgaggatgtgacctggtgggctctgcagaaagagaggagagttgtaagtctgtcacctgtgaacatctggcagaggttattatgcatgcaaattttatgcatgaaattcaaagatggaggccgacaccccctccccccgcaagttttatgacctgtggataagttatgcgtgagttatgcatctgactaacgtaggggcagacccgggagcgtctgtctgggtatttccagctagctgtgtctctggttctgagcaggaggattgatacccctccaggctctgctctacatctttcccttcctaccaccttccctccctccctccttctttcattcagcaaatgttgaaaatgcagccacaatgcaccaggtgctatgctgtacaccagagatacaaccacccaaaagagagacctggtttctgcttccagctggcaacgtagcatgctagttgaggacgcagacctgaagtccaggggtctaagtcccagttctgcatccacgacttcttcctacctgtgcaaacctcgggaagttacctggctccattctgccccatctggaagtagaattgtgctcaccttctaggctgtgtttgtgaggacaggaggtacatacacttaagggaagcaggcctaattccagggagactaggaatatgcatgttggggtctttttcctccccaattttggggctgtgcgggaagagaagatggaagtgggacccacccacttcgtctaagcctcaagtggagaactgagtgatggagggcaaaatgtataaatggatgcagcaaaggggcctggggccttttgtctgagaagtttctgcaaacaaagaaagtgagaccaaagtcaaatgggtccctccatgatcctttgtggtcagtctgtttagctcagttctctgcctgtggcagagcataggggagcaggatccatcatccatgggaaggagacaaggactatgcagggtggctgtgccccagctgatcttcaggcaggagcctagcacccacgtaaactagagagagagctgcccagagatgccgccgcagttatccaggaaggggaggcagcaggaggcaggagagatttgactagtgaggaccaaagctcaggggctacaaacacacaacacctgtacctgggagaacgagacagagcttggtcctaccaccagccagtgaggcttttgacttgccctctgccctgtcttctttcaggtccaatgtcatcttctcagtaagggcatttctgggcaccctattcaccatcgcacgccctgcacccactctcttctccactctgctttcccctttagctgtggtcacaccaaatgtattatgcattttatttctttatattgtccactggggttctacctatgaggatccaggtaggagttctcaccgtcttgctcacagtacctggcacagggtaagcccctgacaaatcattcttaaataaatggatagatgggtgaatgaagagtgggtgtcctgatcaagtttgctcacacattaggcttataacctctttagaaaggggcatctgtcactctgatggccctgaaaatatctcataatctgtctttccaattttccctataatgtattttcttaaagtaaacttcagttagagtaaatttcctatagaattaaatgtgaaaaatcctagtgctttgtaccaggtcagaattaactttcataaagatgacctcggagctgtcccttttcacatctttttttcagggaaccatgagtaaaagtataaagacatttaaaaaattttccttaaggaaaagagatgctaaagtcttctctagtctacattagacagaagaaattgagccaggaccttgggttggaaattcttatctgtatatgtatttactcctttgcttaatcattctctcagtcaacacatattttgtactccctaggtgctaggtgtgatatgaagtacaggcagtgatgagtaagctgtgctcttggactgaatgctttgaaggtcaaggaggacaatggtgggggagaggacattggctgtagacaacagggagttgcaggtggtcttctggtgggcctctgtgtgagtccactgagagtcaaggcaaagatataaagagtgatgaaggtatgaacagaaagaattgaggtagcaaggggaggatacattttttgagaattttggaggtgaagaggagaagtcaagggttgtattgggaggaaagagcagggttgaagtttgggaattgaagtgattatgaatatgttgtaagtacgtgggatgtagccaatggagggaagagctgatgatgtgcggaagccactaacccactaaatccctttcccgcatcacaggccctgctgaaagggttgacaatgaagactctcaggccaccgtaactcatggagaagccctgagcatctggcccgcttgtaagcgaaggaatgtgctggcatcagggctgggtgggatttcattttcctcctatcaagttacccttagccctggtatcgtggagaagtttgtagccacgggcatgccatccaacggaggcagcctctacacttgtgccctgaaaaatctaaagcaaaataagtcatttggcaaatacatgtgggtgcctgaaacaagccaaaagacttcagcgttcaggatgtgcaagccacattaataataatgagaaggaaccaggtcatctgtttcctgatgctcagtcctggcagcctcttaggtggaacaggggccagacgctggctagagagctcttacctagagttattggtctgtgtgttgagacatggggcgtctcctggtggcctgagtgggatgaggacatcagctgagcagcagtggtgctgctctgcagcttcagcttacgtgttgtcccagccacatagcgctggaagaaacctgcctggaatgtgatcaagtgagttctcaggagtggggaggtcacacgtgctgcattttgatgctgactttttatattcaaagcaatttgcccaggtgagctcagtacaagtattgcattacctgatggtttatggataaaatacctggatgtacaacttagttgtctcaaattcagcaaagttgttatagtctaagtgatgggggtggggggtgttcagtagaggtctgaaatcctgaaatctgggattacagtgattctcatagggagatttcaggcacttttctgtcatccactacctgcccttctgccattgcagggtctagttatctttatctcctctgaggtctgagttctacattcacttgtttcctcatttattcattaacaatattcatttcttagccaaggatggtggtgcacacctgtacttccagctactcaggaggctgaggtggaaggattgaaaatccatccatctgtcctcctacccatcctgctatccatccatccatccatcctcccataatctatcttcccatccatttgtccttccttccttccttccttccttccttcttccttccttccttccttccttccttccacccatccatcctcccattcatcctcccatgcatcctcccatccatccacccaaccatcctcccatccatcctcacatcgatcttcgcatccatccatcgatcgatctatccatccatccattctcccattcatccatcctcccatccatcctcctatccatccatccatccatccaccctcccatccatccatcctcccatccatccacccttccatccatccatccacccacccttccatccatccaccctcccatccatccatcctcccatccatctatccatccatcctcccatcctcccatcctcccatccatccatccatccatccatccatcctcccatcctcccatcctcccatccatcgtcccatgtgtacatctgtcctgccatctatccatacatccatttctccgtcctcccatccatcttcccatccattcatccatccatcttcccatccattcatccatccatcctgccatccatccttccattgatccatccatccatcctgcaggagaccaggagttcaaggctgccgtgagttataattgtgccactgcactacagcttaagtgacagagagagaaaccatctccaaaaatgaaaaaaagaatatattgatttcaggccagttacatagattctgtgttgaacaaaactagatgtgtttcattcctgtctttaaggagcataaatctaataggaacaacagataatttttaaaaaatatatcaatgtgtgtaaaatttcaacaggaataagccccaaggaggtgtggtacctggggctataagagtagctaatagtagaatttgggatagtcttggggaaggagagggcagagaaggcttcctggaggggtgatggttgctttgagagtggagagaaagaaccagtgttcttggaaaagagggtggcctgagcgaagggcctgtggcaggagggagtgtagaattcaaggaactgggaggaggtccttgtggctaggaatatgcagagtaaggggaaaaaggcaagaaataaggctggagagtggggagggccacagcacacgaggccttccctgcccaccttgcccacatgccccagacgtactgaggagctggatttggtcattgttcttatgagtgctgtgttcccagatttccccttcataatctggcgacatccaccagagccagctcctgtgtccctgatgtgattacccctgactccttcccctcctgacacctgccccaggtactcacacctctaccgatgatgcctcagcctggccctttggctttttgaccttggacccctccccactccctctccacctctctgcttcccacttcccttgtttccagctgctcctttccctgtgagccatattggttccagccccagcctctgcaatagcttccccaaatgaagtgaatccgaggaccacgtaggatgtaagccccgtcaccgtggtgttggttagtgaatgtctctttactgtctatttccccattcagtgcctgtctccccaaccgactgaaagctgcaaaaggacagagtccttcccagggcccagcacaaagcttaacacgcagaacatgcaccataaatgatatccaaccatgaccttcccctcccccaaactgccccacagagcccagtcccacaaagcctgagacaaaggagctgcttttcacacagacagacacagacagactgatggacaagctggaggacccggggacggtgagaaacaggctccaaaagcattctggctgccagtatttaacacacagagctattttcagatgctagtcacagacattttgaactgcattagaataaacagaattctgaattatcttctcagcagtacatgaaagaactgtctatcacccaaaagggaaagagagaatgatgaatttctaaggtaaaaattctggaagagggaggaaaaaaatccaatccacaggcggttctggaatcttctcacacaacaggtggtcccccgccctccagtcccctaactcctgtgattaggagaaagtggaaagctgtcagctagactgggctcaggctgggtatctgggctcttggaaatgtatatttatttgctcatgctaatggtcagcaggccaggataaatggggctggggcattaatgcagagccctgtaaatcatgcatgaaggggaagaccatgcccagcaccgaggggccagccagccgaggaggctgcatgaaatattcagcagccagacagactcaggcctgctccaaatccccacgtccagacctctgaggatgtgatttttgcagaaagctttaaaagaacctcaaatgccttatccttgtgttccccaagtctcctatcaaagctggttcttgctgaatggtgtctctgtgttccgcctctggggcgttggtcatgaggaccccacactgatggttcccctcccctgtgccactgcagcactgctcacccatccggccccgcagcaggctgtggtttccctccctgtcaaccacagggcccttgtacatactttcctgtttcaggaaggtctctgcctggctcatcttgctctccttctcttctttaggtctcaacttggatgctacctctccagagaggcctttgttgcaccacccaccccacccctaagttggccttctgtgcagttctctagctctgtcctctgtcctctttcatgccctatcacagctgtgctcattttgggggcatgctgtcactggctctttgctgtcctcctttaccagaattaatctccatgctagaagaggctctgtgggcccatccttgctgcactgcaaagcagcatctggcatatggcaggactcagcataaagtcaaggagtgaaaaacaggtgcctctcagcaggcatgaggtgagcctggaggttcatccctggactctacatctcctctgcagaaaatgttctgatccttggatatgatcttcaggttccctatccgtgaagtctgtacaaccaataagccaggcaatgatttgatgaataggaatagtaaggtttttttcctgatccattctaactgcagtagccaagttaacatatggcagtgtgctttctcaggacaaacaaacaatgatagattcatacccaagctgagaggggcgaactgtaatgccatccagcttccctcccagtacaacagggccctctggctttgtgtgggtgcttgtggatagacacctcacttccttccaaggtagctggttccacttccagccaacagctcaggctgcctcccagcccagctatcctgcaggttccagccccacagcacgtgtgtctctgtgtcctctagccagtaggcttctcccccagaatgctggatttcttatggagattttcctggataagatgagcaattgggctgaccattggaccatgtgtattgatgcagttattgtatgcacccagagatggagaggcctggtgcttccattctgatgtgctcttggagaaagccattgaggaactgtggtcagcaggtgttccaggagtttcagcgccatgggcttagtggggcttcatggccctgtgtatgcatttccgtgtcctgcagccagggtgtcagctcactgcattcattcaatagctcctgagttcccactgcatgccaggtactgtgtgtgtggtggtggggggtgactttttatcaagcaaagtcaaaccacacatgccccctgccttttaagagttcaagatctgtagcacagacagccatggggactaggagctccagcaccgtgagctgtagtggatgtacacagagtgccccgtgggcaggcacaggtggcagctaattccagccgggctggcttggggattccttatgtgacacccactgtagacccagcctgcagctgtttccttcagtggtcacctccgcctgatgaaggaaggcaatgcgttctcgtgtgaacggctgctctttgcttctggtccaggcctgctcggactccatctcgctcatggcgtggctttgaaatgatgctcatcaggctccctgacctgctcagggataggccactgtgagagttccgctttgattttcaagcagctgagacaccagaggcgtggtgaatccccccagccctcccctcagaataagctatctgtccggtgagaatagtcactcctcctgttctttgaggacaagaccagcaaaagacttgagtcaccatttccaaagaaaaacaaggagaatgcaaatttctcggcttaaaaatatatacaaagggattgattctatataactctctggagtaagaagagctgtgacttccattggctggtgctgtttagagaaggatcgctgtgctgaagttgaaaaagagtgtattcagctttgatatttggagaaagtgtcccaaccatcatgtatttctgcctggttttcttttagaatgcaccagctggagtcgacattaaagggccccatttcccatttgctgcagaagatgtttaattggaagtctctccctgtccttttgtaagcctcatttctgcatattagctttacacatgagttctggggtgactggtcaagacgggagtctgtgtgtaattagaccagaccaaggaagaagcaggaagtttgctggcggagaacatgggagtctctgtatcgcctttaatcactcttcctgcttggtgtaatgttcacatgttgtctttcatcacagccatggggacagagcgccagttcatgctatctcctcacggggcccttcggtccatctccacccaccacccagccctcactgtcatctgtctgaccccattggccttgctcttctttttggaacatgataacctcccgccagccgccccagcacagtctcaggacgtttgcatgtgtcgtggcccctgcacactgtttcctcagctcctggcctgcttgttcccttcccattacccttgtctctgcttaagcatcagctcctcagaggtcctcctgaccagcccattgcaagtaccctttccccttcctccttgcggttctgttgctccctccaccttgcagctctgcagcttcccgtgaatgtgattgtttacatgctgactatcatgtcccccacctggctgttcaccccttgacaccagcaccagctttctttctggctgcgttgctgcctgtgcctgcagtggtggctccgtaagcatctgctgaacaaacgcatggatgaatgagccctttcagatccaggctgtgtggggctcaaaattaaagaaaacaacatacaaaatgacacatataaaattaggaatggggtttatttaaattcttaaaagctgctaaatttctgtacgtcacaaaactatacagtattgaatattttaatagttacctgattgtattgtacgttttcctacatttttctcttgcatacattttgccttttcatatgacaaaaatgtttggtattgcttttaacaggacagaaagataattcctctagtgtggtcagataaagcttttttttaaagttatggatagttggtggcatgcaacgtgcagatggtcacacagacagactcatgtggcattgggtaaggttttgtcctatagacacaagaattttgatgtattctttttctttctttttttgagacagtcttgctctgtcacccagcctggagtgcagtggagcaatatcagctcactgcaacctctacctccagggttcaagtgattcttgtgcctcagccacccaagtagctgagtagctgggattacaggtgtacacacaacacccagctaatttttgcatttttagtagtggcaggatttcaccacgttggccaggctggtctcaaaatcctggcctcaagtgatccacccacctcggcctcccaaagtgctgggattacaggcatgagccactgcacccgtccttagattctttttcatcccataaaaaaaaaagattcatttacatttgtgtatatgcattacaaattattccttacaagggagaacatttattttgactaggtaataatgagaactgaatcctctcctgataatagcgtgtctgatgataagaagatttttcttagactggcttctggctccatacatttcaaaccttgctccttttcctcttccaccagaccctctggtgctgggcaccaatgagaagctcatctggccccgggatcctggcaggacactgggagcactatttccatgggcagcagggttgttcctggagacatcactgacccaggacacctagcacaatggcactcgatgtgaaagtggcttcgtacaaatctgccactcaagcctaaataagtgcattccagaagagccgcagcccctctaacagctcctgaggtgagggaaaccctagggatgggaagttggagcagaaagagatggtggcctgaagtcaactgcagtgaaaatctctccccatcagcaagttttgcaaagctatggccacagggacacatgactggggcccctcctagtcttggaaggagcccccatggaaatgagggcctcacagtgaatccacctctgatcctacttcacctgcagtcaaatgagaagagatttcaatcagctaaagacaccctatcccctctccccgacccctgcgaccccaggagctcctgccttgtcactgtgtccccaaacgaaccgcatctgaatcaagcccctttctctccctagtggtcaacatctgggctgtgatgggcagctcccactcttgccttagaatatgactggagaggtgacttctcatcacatggagaatatgttcaccccatggtgctttccacccaagctgaccatggcttgactttttggtgtagttgctagctctgtgccatccttggcaatgtgaccctggagcagctgtccccagtgtgcatttgggggatttcatgtaattatgaataggatgcaaattttatagccccagtgaagggaaacacccctggcgaggcttcccggggccagagagaggactccactgagggagatggtggcagggccattctttgtgtcctgcttttttttttttttttttttttaacatcctctttatgtcctgagagccatgtgcagatgaggaaaaatgacatgcaatgcatttttgcctgccacaatgactttgcaatcataacaagcaaaatgttctaaacagtaagtgaatcgaggaagatatactgccaagtcaggaagaaaaaatccacctgttcagtgatttcaggaactgctgaagaaaatcaccagtgagtatcagtttctgcaagagaatctaatgcaggctttgcttctcatcggaatcccccagctggtgtcttggttgactgagagtctgggggagagggcagagaatggatttattctctgctaggtttttaacagtcaagaagggctgtggtcctaaggggcactggtcaaaccttagtgtgcatcagaattatctggataaggctaggcacagtggctcacgcctgtaatcacagcactttgggaggctgaggcgcgtggatcacctgaggtcagaagttcaagaccagcctggctcttttagtagagaaaccctatgtctattaaaaagtacaaaatttagccaggtgtggtggtgagtgcctgtaatcccagctacttgggaggctgaggcaggacagtcacttgaatctaggaggcagaggttgcagtgaactgagatcgtgccattgtgctccagcctgggcaacaagagtgaaactctatctcaaaaaaaaaaaaaaaaaatacctggagagcctgtgaacatgcatagtgctggaccccatgccaaagatactgattcagcctgtctggggtgggccagagattctgcattctgtctaaggagctcccaggtgaggcacatttgcagaccacagtctggaggtttgaggacttggaagaccatggctgacatatcttgagtctctgccttggtatcctttgccaagcagagaaatgcactgtttatgtttttcaggagctcaggaagcagaatgcaacccatgcagatgtaggggctggattctctctatgactgagtgggagtctcagccccaagaaatgccccgggttggccctgaaatccacaatggcttgctgggctggaggccaccagctgatgggacccaagagaggaatgaattatttatctggactcctcacagagaacaatgccctgcaaatgtcccccgcaccatgctgggtggaattcatagtcaacctaacaaccagcttagcatcttctctcccggaccttgcccctccaaccgtatcgaactttgaggagcaattagggaattgcttgacatcttccctgcgagctcttgggtcacaaaagctaattaaccttcctcttgccttccaaactaagtaacaacctccagagccaagtcttctggaacaaaacaggaaggaagaaagaaactaagaaagaagcactgtctctgattttttttttttaatgaaggttaacatataatttttaaaatgaactccatggaaaggaggttgtggggttcacaacccctgggagcagttccagcagtgccaggacggtctcagtggcagccctctgctcatctttgaggtctactttgcccagcagctaactcttgtaggtggaaacatggtggcttcttgttctctgggaagttctggatgggaacttgatgtgggaagttgtgaggtgccctgaacttggaggtggggctcattggcaccacagtgatggtcccatctgtgccatgtagacttgaccaagcaactcaaggtgtccttaatgtcccagactgagagagaatttgccggcctccaccttggaatattgttgactttcagtgcacgacgcaagtcctctccttcaacactcctctctaagaagatacacagtcaaacacttaaggacttgggcttgcggagggtgtagatctgggctcagattcccattctgacacttactggctacgtgacctacactgtgattcccaaatgcctgcatatccacataccactgtgtcccactgcactagctacccggagctgccataacacattgccactaactaggtggcttaaaaccagaggaattcattctcttatagttctgggggtcagaaaacttttttttatttgtttgagatggagattcgctcttgttgtccaggctggagtgcaacggcatgatctcggctcaccgcaacctctgcctcctgggttcaagcaattctcttgcctcagcctcccgagtagctgggattacaggcatgtgccaccacgcccagctaattttgtatttttagcagagacaggtttctccattttggtcaggctggtctcaaactcccgacctcaggtgatctgcccccccttggcctccctaagtgctgggattacaggcgtaagccaccacacctggccctgggggtcatatatcttaaatcaaggtatcaacaggaccaagctccccaaaagctccaggaaaggatacttcttggcctctcttctggcttctggtggctgcagcaatccttggggttccttggcttatggatgcatcactccgtactctgcttccgtcctcacttgaccttctcacctaccttcctttacgtcatcttccttctgagatgctctgtgtccaaattttattctttgtaaaaggatgccagtcattggatcagagaccaccttaatccaggatgacttcatcttaactaaattacatctgcaaagattctatttctaaataaacccacattctgaggttctgggtgggcatgctatttggcaggacaaagtcaacacaggacactcattttcaggattgatcgcatggtttgaggaagctgatggtgacatctcttcttaaatctgttttcaggaaaatcatactggtagccttcaagtggccatggtgggagcattgacccagggaaatccacatttcccaacacatgctggatacctgaggactccagagctactatctgctcatatctgctcaacattaaaaaaaaaaaaaaaacctcacattgttaagtgaaaaggtttattggcagatttgcttaactcaatttgcaaagataccttagaccaggggtcggcaaactacattccacagaacgaagctgcccattacttgtcttttgtttgtttgtttgttttgttttgttttgttttgagatgaagtctcgctcttgttgcccgggctggagtgcaatggtgtgatctcagctcactgcaacctcaacctccctggttcaagcaattcccctgcctgagcctcccaagtagctgggattacaggcacatgccaccatgcccaactgatgtttttgtatttttagtagagatggggtttcaccatgttggccagactggtctcgaactcctgacctcaggtgatccactgcctcagcctcccaaagtgctgggattacaggcgtgatcctaagtacagttttataggacaaccatgctcattcatttccgtatcgtccacggctgctctacagcagcagagtttagtggtcaggacagaaccggcacaacctgcacaacctgcacaactttcaaaggctgaatatttactctccggctctttagagaaagtttgcaactcctactttagactgatgcttctccaatgctaacgcgccagtcaccaaatcaccggcatctggtcccagcctccaaccataaaccacagctgaatggaaacttggtagcgcttgccttcaatagcagatgctgtaagaggaaagcaaggtgaccaagaaaacattgcaaaactctgggcagaatctggggcctgaagactctgagtcagaggcctctttttttgctctaaacacatattagcaagagtccaagaggcatcaaagatgagttagcagcaaaatgaggctttgtccttcatgtagaaaggattaaatgatagttgaaaatgcaataactttcaccctgtgggattcagtgatgttcagtgctgtgattatgtccaacttcaaatcttgctgtcccaactgggacagcccaaacatagggagccactgcactaagatgttatgatttattaagataataaagctagcgggatgacaaatgtttcatttttcccccatgtgtttcccccaaaggaccgtctgcttttgcatgtgatttgactatgcgctgaggacctagcgtggtatatcagcaaagtggaaaagtgactgaagtgactgtttatcatcttgtaccaagttacaccactttaagctttaactccacagctcttgcattattttaaaaccgtctggcagatctctaaaactaatggtacaaaccactctgtgatacattaaaatacatcccactctgtcatactgcaaacaagtagctgctccccagtctttgaaaaagtactttcaagataaaatatgtactcatgggttctgcaggtttttaaaaagtcttgaatcttcacagatttactgggggggaaggggcgtttcatgtaaaatgtgtttttccttgacatttagaggtcttgcaaagtggtttattatagatcttgtggacatctcgctatttaattaaatttcagaaatatattctctgcactcataagaaggaatatgaagagtgtatttgttcactgtctatttattattcgttttctgtttctaacacaaaattatcagttcgaaataagtcatcagaggcacttaaaatttttcagggtcagaactctaattaacctcagcaactctgcttaaaatgttgaataatataagacaagtccttacaggaatctttggtaatattcagtcttggtgatatatttacaactattttttaaaaactgaccttcaatgtctattttcaaaagacgtgagggaatggaaagcagattgagaaacaagtcacttgtgaggtctcatccaacacatttcagtaaattattgctggatgtaagcagctgaatttgtaaacgatttcattaccttacattttatagagaaaattaagagtaagttcacagtaaatgaacctctagtctgaaaatagctctttctcctcatttaaacctgaaatcagaaggatacaacccaaatgtgttccacccaacacattttgagataaatacatttcacaattgtcttattggtggatttgcttaacacaatttgggtatttgttaccctctgatgaattcagaggagtttttcagaggataacattgcatgtttgcaaaaagtttgcatgtttgcatgttgcgtgcaataagtttgcatgctcacaataagtttgcgtgtcctttagtgctatcttttatttttctgttagggattctagtttgcagtagaacaatttcctcctgcagcctcattcaaagtaccatcaggattcaacctgtttctctccatgagactgttttgctcctaacttatcagaataagagctcacgagatcagcagctgacggaaattgtcggaacaggagctgctggcacccgtgtagaaagcacagaaaatatgaacagttggaggcccctccaggcaagtcacctgggaaggctggtgacaggtgagaggaattggcacagcaggtaggaaggtggtgggcaggcaggtaggtgggcaccttacccattaagagctggaaaccttggccaggctcagtggctcatgcctgtaattccagcactctgggaggctgaggtgggcagatcacctgaggtcaggtgttcgagaccagccttaccaagatggtgaaaccccatctctactaaaaatacaaaaaattagcagtgtggtggtgggcgcctgtaatcccagctacttgggcagctgaggcaggagaatggcttgaacctgggaggcagagattggagtgagccgagatttcaccattgcactccagcctgggcaaccagagtgaaattccatctcaaaaaataatgaataaataaatagctggaaaccttgaggggaggcaagactgagaagggagagcccagggcagacattaatgtccagtgggctgactgggtaagaagtgaggaagtggaagccagagcccagggaaagaggggagggaaagtgctgatcccggggccactgggcaccaggctcgtgttagtttcctgtgtctcctgtaaaaaatgaccgcaagctcagtggcatcaaagagtgcggatttagtatcttacagttccagaaatgggaagtgggaaatgggcatccctggctagaatcaaggtgttgtcagagctgtgatcctcttggaggccctgaaggagaatccgtttcctggcgtctctggctctgaggggctgcccactttccttgggtcacagccccaccctccattcctaaagcccgcaaccctgggaagagacctgctgctgctgtcttccacttataaggacccgtgaccacactggacgcccctagacagtccaggatatgctcctcatctccaaaatcagcttaacaaatggaaaccctcctgtaaccctaagccctctgtttcatgtatagtgacatagccacaagatgtggttgttaggctctaggtatctttggagccattattccatcttctatacaccagtgcagaacaaaggcttattactcatggggaatttgcaagatctggtaccaaacaggatgtggctggaggcacaattgacccttggttctgctgtgtcacacaccacctgcaaatctagtgtcataaaacaactgttttgttatgtgcacagaatctctgggtcaagaattcagccagagtgtggcagggacactgtgtttcttctccatgagatctgaggcctcagctaggaagattcacacatgggggtggctccatggctgggggctggagacgtctgaagttaccttgtctgtgtgtctggtagtggatgctggctattgcctgggaccttgatgggaatttctggctcgcagctgggacagctacagccagcctttccacctggccttggtgtcctcacaatatggccacttctgggaagtggagcttccggtgccatggctgagggctccaaaggcctccagccacagaggtggaatccgcattgcctcagaggtcacaccacagcatttctgccacaatctgttggttttaagaaagttaccatcccatcccctccacctccctaattcacagtgaggaatattagatttcatctcctaatgaaggagtggcatggactgagaagagcctgcaggatgggagagcctgaggcatccgtcttcagaaaaacaatccgccactttcttttaggatcctggcaaggccagtcctcagcaggaatgcagtggtggtttccagctcaacccttattctggggttgccagatgtagcaaggaaaactacaagacatccagttaaatttgaatttcatatgaacaatgatttaaagtataattatgcccatgtgatatttgggatatacttatgctaaaaattttgtttatctgacgttcaattttcactgggcttttttacattgtatcaggcaaacctactccatgcagaatgcccatttaaaaatatgttgatcatcatccctggacatgagggaggagaaagagtaacaaggaggcagcttttaagaggaaactcctgcagagggaggccaaaagacccagaccccaggtggttaaacttgtttattccttggcccacttcctcagagccaatgtgatccatttccactttccacagtctgtaaaaatacctcccagccttctggtaattaatgggaagtatagaacctaatcttctgatgagctttcaattagcctgtgtctaattttcaaatgctcatgaataaatgattaactcggatcagaaacaaaaatcaaagagctcacctgcttataaacagaacagtttgagagatcacctcatcatcattttcatagactgcaccatcattgccttccttatgacccagaaaacaagaatcgtcagcctttactgagcatattctctggcagacaccatcatgggttccttagtctcttgaaaaactcactggctagtttctattattttctgaactacacaaaccagcagatgggtgggtgaccagcccaaggtcccacagccagaaagcagcagagcaggaaggattcagtctgggtcccccagcccaggtccttagatcttccataggaagcacttttgtccctacgtttcttcaagagcatagcctttttgccttgtgaggttagaaaagtgaactagtgtgcactagcattggggtgaataggtccctctggctgctacagtgccatgaatattgtccccccaaatatgtcttgagtcctaatccctggtaatcctgaacgtgaccttgttttggaaataggacctttgaagatgccatcaagggcctccagatgagatcatcctggatttagagtgagacgtaatctctttagggctttaggtctctttgctgtccttataagagaaaggaggggacgtttagaggcgctgacagagaagaaagccatgtgaacatggaggcagattggagtgatatttctacaggtcaaggaatgccaaggtttgctggcagccaccagcacccaggaacgagccatggaagggatattccctcaaagcccccagaaggaaccaaccctggtttcagattcctggcccccagaactgcaaggccatggatttctgttgttgttaagccatcggccttgtggccctttgtcacggtagccacaggaacacggagactgtccctctctcaggcctaccagctgctctgctccatccctatcatccccaaaaccaaagcccccatgtttcttttcatcacagaaaacacactgctttagcttctcctccttgtatgtgagatgcaaatagtgatttgtgattctgtgtgtgcctctgcctgcccacctggtgctggggaaaaaacaaatcgtgtcaccagcacccctactggggtcttcagagggaaacttagagtaacatgaaggctttgtgcttttcttagtcacataataaaaattacagtttttataactcgagtgactaaaacacttaaatcacctccaggagtgagccggccagccacttgtcagtgtggctcctgagagaaagctgaagggggcatgtgtctggaaggatgagaaatcacttgctaagtaagaagctcactgagtttaaaccaaaactcagcacctctggttttaggcaaacttttcaaagtcttacagttcctgttttcctgtgtgcaaatacccctaggaaagggtggaagcagaactgaattttgctggtttgcttctttcttagggtaaattctgctatgtctcctccagccctgaccaaacttcaaatatgaggaaaataaacattgtcatatatcaaccggccagttcccagcaattcctgcctgcgtgcccatgcaaggggaggtctggtgctgcctcctgtagtaactacctgtggagccagctgaactcattttcccctgaacttcagaaagtgccagaatcaccccagagcacttgagtacttgccctgtgaagacagcaaggaaatgggagaggatttgaaggatttgcttaagagcggctttgaagtcctccaacagggtgagagagccagctcagcacagacccagcctagagaaggagcatttttctagtgggctcatctttaatttgcaactatggcacaaaggaaggagcagctgtggagaccagggcattggtgaaatgaaagcatattgtttccctccatcttccccaccctggggaggccagggtttctccaaggcagacactctctaagtgaaatctatggaattttggaaacaagataaaagacatactcgactgcaatgcacatactcaccgtggagcccggcacgcagggtaaagactcgctgggtttgcattgcacattctcactgaggagcccggcacgcagggttcagactcgctggttttgggttggtggacttcattttctttcacgctgctgcttgcccagtgggtgtagacagcaagaaaatgaagaaaatcagtccaaggccccttgccatggctgtgccagtcactcacttttaacctgcgcaagttctgatttattctaagccaactgccttcatcagagaaatggagataatggggataatgctttactgggtagtttggaagatcaaataaggtcgtgtcggtcaagataatagcattgactgtcattgattgagtgcctgccacgcctgggcaccatgctaagtgctttgcaggcagggcactgatttgctcctactttacattggaggatagggaggcacagaaaggcgagggaacccactcaaggtcatttggcgcagtaaggagccaggactccaacccatatctaagctggtgctctaactcattacgcgtttttataaagcaccagactgtaaatattttcagcttggcaggtctgagtggaacacaagaactcaatgaaagtgctttttctattctgtcactcacaacaatcaacacagaagacctctgtgatcaaatgtggcagggaggggtttcccatacacacaaagcaagcaatcagttctgcagcaggcccaagctgggtgtcctctaatgcaattccgtggagatagcaccaggtcccgcaggttgagggctgagtccccgagactgcttcccacccaatttcagtgccaatcacaagccccgggttgttttaccagggcttctgcccgaggggctgtaaattggagttcccaaaagcccttccttgggcttagtgaatttgctagagtgactcacagaacttatgtttaacagtttattacaaaggatatttcaaaggatacaaatacacagccagatgaagaaacatgtagggtgaggtctggaagggtctgagtgcaggagcttctgtctccatggatttgggatgcaccagctgtctggcatgtggatgaattcttgttcaccttcctgcctcctggaagctccccaaaccctgttctcttggactttttatagagacttctttgataggcaaccacgtagaaatgtgactggacaaaaagatctggtctaatactaacgggccgagtggggaactccagtaaagcctgtctgttcagattcttctaggcctcctcatacagcattccttcctccagagtgtgggacagaacccattctgaaatgggcctcttgtgacctgtaattagacaaaataggtcagaaaatatttttgttgctagttcccagagaggcaggggaagattcctgctttggggagaaaaggaagcaagtgaaaggagggaaggggaagatcagagagacagattctgtttctaggcctgttcctgaggcctaaagcacacaaggtagtaagaaaggctatgggagttatgagccatgaatgaaaacctctctctctcgatgtatacatatatatacgtacacacacacacacatatgtatatatagttatcatatatgttttatatatctatagataacctaatatcaccacaggtctctcttgtatctactcaactactcaactctgccaccgtagcacaaaagcagccatagacaatcaatgaacaaatgggtgcggctgttttccaagacaacattatttacaagtcaggccgtaggatggggaggggctgcagaagggttgaagggtctgtctttgtccctttgggctgctataacaaaacactataacctgtgtggcttgtaaacaacgggagtttatttctcacagttctggagtctgccaagtccaagatcaaggcaccggcagattcagtgtctggaggccccactttctggctcatggatgatgttgcatgtgtccttgcatgggggaaggggagaactccagcctctgcagcccctcataaaggcacccattccattcagagggccccacccccatgactgaatcacctcccaaaggccccacctcctaacaccatcacactgaagatgaaggttcagtgtatgaatttcacaggaacatgagcattgagtccataagagagttttatttggagtgttggaagtgcctggaactagatagaggggtacactgggaatgtactaagtgccactgaattgctggctttaggatggttaatgttatatgaatttcacttcaataaattatttgtaaaaatcaggcaatagacccaatttggcccacaagccatagtttgctgaccccagcaagctatcccttgtcccaaactaagttagatgtagatatctgagagaagttagagatcaagtctttatcagctgccagcaccttaagttgattgcttccatatagacagaggctcttgagtcaggcaggagggatctacagtctgggtgttcagtgccagcccaactgggtttgcaccgtggctgtgccaagtggtagcggagtcatcccaggcaaatcattcagtatctctggtttcgtttcggaggtctttaagatggggacaataaggattccttccttatggagttaagaggatcggctgagttaatacaggtgaattatccagacagagcccaatgcataagtatctcacctacgagtttgcaatcactttaatgttaataaatgaaggggctttccttacccacgagctgctgcttgctaacacgagagctccctcaggcagccctgtgttttcagagttggcacaagcaagccacgggtaggtatcgtaacaaaggcagtcagggcagttcgaggcagatgtggcttcttcccaggagccggcaggtgctgtgagcaaagcccaggcctgataacgcctgtttctcaggaggtagagccacacacatggcctgaatctctccattcttcagcgctcacagcccctagaagtgcccagctgacagtggaagaggcttcatcttggccacggaaggttggcctttccctgggtgtgggtcagggctcaggaaagaaactgaccatgaactgacactggtgatgaagagtttgataaggaggtattttccagatgtaggcaggttgaaagaaccctgggctgctaataatggaggaaccacttctgccccagtgcctgtaggagcaaggagggtagcagttatggcaactgagagagggaatctgtgaggagccacagctgcatgaaaccagccacccgatggaaacgggggcttcagaagaagggcaaggccaacctactgcactggagcagagagaaaaccagaggaacaaatgcctcaaccattcttcatcctcagatgtgttctcccttcaggggccaaagctgaacagcagccgctctaggctgagaccatctccacggcaaccatttcaaccaacagttgaaagttcaacaaaaatcctagagaaggttctgattctccaggatggagtcttcactgttgccagtgggagaaagcattctgattggctaatccttgtgtgcaaaggggttcagacaagaaagagaagctcagagacccaagaataaaggaagagcagcaggcggcagaggatgattgtatctgctgacatctgccacactcattttttctcagaaagaggctgttccaaccttccctggaatcaccagtattttgcaatgaccttccgcaggagcctacagatctccctgtttcccccgccccctctttcttctcctcttttctcctatttcttaaagaatagactgtttcttagagcagttttagactcataacaatattgagtggaagatacagagattccccacatatataccctgttcccacatgtgcacagcctcctccattatcagtgtccttcaccaaagcagtgcatttgttactattgctaatcctacattgacaggtcattatcacccaaagtccatagtctacgtagggcttactcttggtggtagaccttctataggtcttgacaaatgtataatggaatgcatccaccattaccgtgtcatgcagaacagtttcactgccctaaatatcctcagtgtgccacctatgcatcctgccctccctctaaaccctggcaaccgctgatcctttttctgtctccaaaaagttttgccttttccagaatgccacatatttgaagtaatacagtatgtagcatttttggttggcttctcttgcttagtaacatgcatttaaatttcttccaaggctggctgcagtggctcacgcctgtaatcccggcactttgggaggccgaggcggacggatcacctgaatttaggagtttgggacgagcctggccaacatggtgaaaccccgtctctattaaaaacacaaaaatttgtcaggcatggtggcacgtgcctgtagtcccagctacttgggaggctgaggcaggagaattgcttgaacctgggaggtggaagttgcagtgagccaagatcgtgccactgcactccagcctgggtgacagagtgagactccatctcaaaaaaaaaaaaaaaaaaaaaagtttcttccaaacactaactccattgtctgaatgcatcactgtttgtttatccattcacgaactgaagaacatcactgtcgcttccgagttctgtcaataatgaatgaagatgtcatgaacatccatatgcaggtttttgcgtggccatacatttttatctcatttaggtcattaccaaagattgaggttgctggattgtatggtaagaccacagtactcccttatcccacggggacaagtcccaagacccacagtagatgactaaaactgcatgaatttctttttcctttttgacaattctgtggatagaagattcgtttttactgtaggtcttagcaacctcagcataccatattttttctttccttattaagtctagagctttcctgttttcacttaaagcactttatggcttctctttggcatatctgaattgccagcatcaataatctcgccctttgggcccactattaagtaaaataagggttacttgaacactagcactgtgaggctgtgacagtcaatctgattaccgagacagccactgagtagccgaggggcaagcagcataggcagtgtggagaccccggacaagggatggttcacatcccaggtgggacagagcaggacagccagagatttcatcatgctatgaagaatgggatgcaatttaaaacttatgaattgtttatttggggaattttccagtttttttttcacaccatggttgacggaaacagcagaaagtgaaactgtggacaaagaagactattgtgtgttgagctttgtaagaaattgcaaaaatgtcttccaaaggagcttaactcttttgcattcctaccagcagtgaatgggagttcctgttgctccacttctttgccagcatttggtgtcatcggtgtcctgggttttgggcactctagtaggtgtgtagcatccttgtatttatttatcctaaatgtggattaagtgcctctcctagtttctcaaaataggattaaaatcatgctattttggtatttatcacaacttcatggaaaggtgggagggacaggaagaagttgaaggaaggctatgattttaagccaagttccatcatagaagtcggtcttcacgagacgtgcttctcctaaaccctcaaccggacaccaggtttctacaccgactctccaggactgtatcccacgtcccacctgccatcaacagaagcatcttgaatcctaactcctactatgggtctgaccaccttaaatctttgggaaacaacagaaagacctctgcagcccgagcccgatacacacaaactcaaataccaagcccagctcccgagacacaccaccaactccaggtgaattctgtccaaagagctgacagctcttcagatgatcgtgcagcatgatttcacttctcactgatcagaatctcttcattcctccgcagggtttgggattcctctttgccaaatcaaaaggctcattgaagtgctttgtgattttttttttggttaatttttttttctgaaataaaggactgatattcctcctaaggacaaactcaaaaatttctgcaagcttaaaaatagcagcatgtctcccttcatacccatcaagtattcaaaaatacagggttgagtctcagaatatccagtttacacaaggaaatattaaaattaaattattgtgaaaatctattttctgctgggaagaactgacctgtgatgtggcatgatgttttctagaaaagcatctcgattttgcctgttcacagggaatcatagctggacctcagaggtctacatgtcgggagatctgttggtttggcaaaatgctttctctcttcttccacccatgtctggagatgcattataattagtccctcctgggttctgttctctatttttctgattttttaaaaagtactttttaatagatgagctctctctgccacccccagtcaagactttgcagtttctgtaatcacagaggtaggaaatcaaaacaacagaggagatttggctctgagcttctgtgtgtgtccctagcggtgggggacattttgcccaacagatttaactggtacctttgtgttctgaagataatgctactccattatctgctattgtgataaacattttatgatttcagagaaaaccttgtgtgtgtgtgtgtgtgtgtgtgtgtgtgtgcgcgcgtgtgcgcgcctctgcacagattggttcctcttcctcttcatttgggaatgtttaccacatcttctggaactgctgatttcagtcagtaaaccaattgcaatcaatatgggcattaagcatcgatctaagaggcagagcagtccatgaaggggaccagccagcagctgcttctctatgcagtgttctcttggactctaagtcatcccctgggccatcaggatccccatcccacatcccataaggcctggggggccgcaggcctgaaaagactgaataacatcagatctctctggctctgctgaatacaataggagctcacatcctcagggaatgtgcataccctgaactgtttcttcagaagcacatttgtcctgtgcgcctctgcacactgtcttcagagttgtaggtgccaggagacatctgaccaggactaaagaactcactgacttacaaagaacagttatgaaaacaatggtgaagggtccttgttggagcgttgttgattgttgctgcgcccatgactgagtagagcgtcaacgaggcagtgaagagccatgtggaggctgattccaatgtaactgctgtccaaacaacacgagcccccacgcagtttttactataggtggctgatttcggagcacaacagtttgaaaggactgaaaaggaaagatccacagacaagatattttccacatgatttcaaaggggttctactttcctgaagcctcactttagaccctaagttcagagctcttattctcttaaatctgctctgaaaacaagcatgcttatttatcccctgattatttaacaaataccaattgagagtgtattaggtaccaggcattggtgacatctgggtgaacaaaacagatggatcctgtcctttgggagattacagtttgttgagagagaacacactataagacaataatgaacaagtagagttataaaatgcacaagggctataaataagcccaaatcatgactaatagagatgaactggtgctgacatgggaggtcatttactcagaatgctggtccagaaagatctctgtgaggaggttgcatttaagccaggcagagagaggatgaggacaagggtcctgaggttgggaggaaatgggatggtccagcacggagtagaagtcagtgcggttcctcccggggatcctaggggagaaggggaagaggtgaacagaactgaatcatgcagagtcctgcaggacaggtgggggtttgggattttcttctaagtttgataagaagctaagtacggatgtgacctatggcccattttaggtttaagactcctcttcagctgtagtggagtgaactagaaggggcaggagtgggggaagctaactagtgcagttatcctggtgagggctgatggcaggctggactcagatggttgcggtggtgataccagcgggctaggggaggtctccaaatgccagtgagacctcgaccccggccggtgtcaaggctcttgatgctgtcatgtgaaggaattcaaggatgagttggaaaaaactacagagatttattgtgaagagaaaagcttgcactcaagacgggagttcaggaatactcaagagagtcacacccgaggcaacttgggacttccatctttatgggtttctctaacggggggtggaatattcatgaaaattcctagaaaaatgtaaaggtttctcaaaactgtgttgccacccgtttttacaccaaacatgtgtgttcccagaattgtcctggcactgatgggtgtgtgactcagaatgttaatgagcatataatgaggtcctaggtgaaacctaggtcaaatccagtgccacgctgggtccagtggtcttagccagcgtggcccacatcctgttgttcagggtcccattggcccctctcttctgcagctatttcagcagtttccttttgctaatcatgcgacactgctgcctggaagtttctagtctccggtgaccacctgaccaccctgtattactcctgtctcagtggggatggagagaggtaaagcaatttggggtacataagtggtgtgccagtaagccagctctctggaataaacaaagcccttagtgttagggtttgccgatttccatggtgtaaatactcccacaatgggctgacccctagtcaccagtgcgaggtcatggccgaggtgagaggcctcatgtacggtccagctgcttccccctgctggctgggaggagaaacctgaggcctgtgcattgaccagtctcccactgtttggtttgagtcattgagaatggcagttccttcagttgggaaggtacaagactgcaagggacacagatttgtgagtggggcagaggacctgcaaagaaaggctgtctggagctcctgccctcacaggtgtctccaccagcccacagaggtctctccccttggaaacctcttgcaatggtgttggttctacctgattagtctcttatcacaagcacatggccctgctcgctaagtgtctgctcacatagttatgcagagatctgtgcagtaagtggtagcaacaagagtgctgggctggaaatccagagatcaggaaactgggactggtggaaaatatgctcggggttacctgaacactgaactgctcaaatgcaggccttctgacccgaaagggcccaccttctcctctaggtccagctgctaaatttgctaattcttaaaaatctattcaaaacaaaacataaaaactaaccagattttttttctcgttttttttcctctgccccgtttttctactgaattattatgcaagaggagaagtagcctgtgctgaaaaatgcataaatattccgtctatagtaaggcagagaagtaatgaacctcagtgtaaaccctgcaacatacagagacagcagcaaatgtgttcatttagaaattacgcaggtagtgtgctttgagcttttgttctgtgttaatccttcaggcgctggttaaaccaaggcgttgtacgcgtggtggaccttgatctgagccctgctgagatcaaaggctcaatccggaaagctttctgctgattttcttgtgtcttctaccatctccaagcactctgagagcaatttcagagcaactgtcaaagctggcagatgatgtttatatcaggatgctgtttgtacttatttatttaacatctgatggtggcagccaacctgcccattagacagtattaataaaatgcacaatgttaacaaggtatacaggagacttttcgcttatccttatccacttaacccaacacagagcttttaatctgcattcaggtaaagcaagaggttaagaagaagcaagaagctgggcgtagtggctcatgtgtacaatttcagcactttgggaggctgaggctggaggatcacttgagggcaggagtttgagaccaacctgagcaacatagagagaccctgtctctataaaaaaatataaaaaatatataaaaaaaaagctggacatggtggtgtgcgcctgtagtacccagctacttgggaggctgaggcgggaggatcatttgagtccaggaggttgagggtgcagtgagctctgatcacaccactgcactccagcatgggtgagagaccaagatcttgtttcaaaaaaaaaaaaaaaaaaaagcaagaactcaagaactctgggatcagatggatccaggtttgaatcccagctcaggttcttattcactgctcggtttctgcaggtttcttaagctctcagagtgtttgcgttcgtgtctgaagtgagagtcatcttagagccatgtcctagagctgttctgaagattacaagtccaggtttaaccatattaatgatggtcattatcatgattattatatttatattcataacctaagtccaacagatatgggctaagagcccagttctgccttttactcactggtcaccttcatcccagcattctccaaggttgtttgggtgcaccccagatgttgcctccagccccctatctcccgtcagctctgaaatttctgcacaccctgggaatttacttccttacagtccacttcagggctgggtttctcttttccaaatctcacttgctcttgtctctctcttctgacttaaatgtaaaatcaggctcttgtcatctgattcacacacacatatacacactcactcactcacaaaacatctgtgtgtgtcacaggctttactgacaatggagggagttggagggctttcctatatgagacctaggtgcctgacaattaaagcgcctccactctgaaaagccctggggcccttccaccttggcacttgcatttcctatctttctcctcaacccctcccctctctcctctccatcctctgtggtcccagagcctactcctacatggaatcccaagacctctagaaagacatggcgattcagaagcaagagcagggaggctttcctctggccccttcattatccaatctgagaacctttgacggactagctacaaaaaaaccaaccaggataaattccttacccacctctctaacctctccctgatggcactaggaggtcccaccaatcatttgaaatctttaacggatgaaaaacagatgttagacattcatccaaaagcattggtcagccacggtagctcacacctgtaatcccagcactttgggaggctgaggtgggaagatggcttgaactcaggagttcaaaaccagcctgggcaatatggcaaaaccccatatcaacaaaaatacaaaaagttagccaggcatggtggtgcgtgctgtagtccaggctacttgggaggcttgagcccaggaggtcgaggctgcagtgaaccaagatggtgcgaccgcgcttccagcctgggtgacagagtgagaccctgtctcagtaaataaataaataaataaataaataaataaataagcattacattaaaaaggggtgttttctatttagcactattatgtcccagggaagaaggactcctgtcctagaagctgaatctgtacaactgcagccaaaccctcttcccaaaggacctcattgaaaggcagaagtcaagaagtggttatcactttaagagttaaaagagaaaggtactattaattttccatttttagccatgaaatctgtagctgtatgcttatgagaagtattattttaacctttgtatttctctttacatgactttgtggagacaaaattaaaagttaaaaattgatacctgacatcaaaagctcagcatgctgaagggtacaagccacgaaaagaaaaaaaaagaagaaatggtggcctttgaagactttgctaatagacacattgaagagtttgcattgtctacaaagatctatgtcagagaaatagcctagagagatatgtggcagggaaggagaaaataagatttgagtactttggcatgagcccttacaattaacataagacatctgaaaaggtttccagaaactaatcaagacagtatacaataaggtacacctgccagcatacccatatttcttttctatttataaattgtggattctttccctgtatctctaatagtaatgaaacattttaccttagctcgtcttccctgcttcagtgacaccctctggtgtgccatgacccagctagccttagtccacagtgggtccagggaggtgatcacccatgtgcttatgaaggtaaaaaattcctgctcaggtctcaatgcaactctgtctccaagaagccctaagaacgaggagagataaacttaagaatactgcatgcctcttttctgattataagaaacatctctgtaaataaaccatgactataaaaatatagacaagataagtattgtgttggaaggaaatatatccatcaagtaaaaaaatattagtagatcaaaggagtgaaaagaataactagcatttattgtatgtttacaatgtaacaggcactttacttaaactgtttcttttattttgtacaatgaccactttaagtactagaatttctattcccattctacacacaaggacagtggggccaagagagctgagtgggggcccaaggactgccagtgcagagtcttggcttccagcaggggtttcggaggctgccctactgcagtgacacagctgcagctccatagaaaacagaccctcttctcccctctttcctgatcagtcaccatgtatataggtgacaagaactttcttctttctcctttctttctttctttccttctttcttttctttctttctttctttctttctttctttctttctttctttctttctttctttctttctttctttctttctctttctttctttctttctttctttctttcctttctttctttctctttctttccttccttcctctctctctctcttccttccttccttttctctctctctctttctttcttttctttctttctcttttttttttttttccaagacacagtctttctctgtcacccaggctggagtgcagtggtgtgatcttggctcattgcaacctccacctcccgggtttaagcaattcttctgcctcagcctctggagtagctgggattacagatgcacgccaccatgcctggctaaattttttttttatttgtggtagagatggggtttcactgtattgtccaggctggtctcgaactcctgaccttgcgatctgcttgcctcggcctcccaaagtgttgggattacaggcatgagccaccgcgcccaacaacaagaactttctaaactcacctctttgtttattttcaccccttgctttccaacgtgaaatgtgcagttttgtggaagttcaaacaagccacccagctgaagcctccctggggagacctgaacttctgcactcaggcaagaccaaaattaagatgcttttgctctttccaggcttgtctttatccatctaaataataaatactcatgtccctctatagtgatacatctcacctttatgatcaagcacctcagtgccgtttgagtgatggatttgtcaaaattccttgagggctggcctctgccactgcaggcttgcagcccccacccccatctgttttactttggaactgcaacagcagagcatctggctgacctccggcatatcaggcggttccttgtgcactgaggtgctgcagtctgtgctgggccctggggctccttccccagataacaccgtggctcttcaggctggggcctgccagtgtcaggacttcagcctggccacaacgggtgtcctcacttccttaggacctggacaaccacatagctagctttttatttgttaatttatttttattggatattaacaaattataattgtatatatttatgagattatatttataattatatatattacgagatacaaagtgatgtcatgacatgtgtatgccatgtggaatgcttgaattaagttcactaacatatctatcacttcaaatgtgtattttctccttttgcctcactgaaacatcctttcgcctctcactgaaacattgcatccttgaccagcatcttcctattccccgacgctccagcccctggtaaccactattctgttctctgctcctatgtgttttgattgttttaggttccacagagaagggaggtcatgcagtgttttttctttttgtacctggcttaatcctcttagtataaggtcttccaggttcatctgtattttcagaagtgacataaattcctcatgtcagcccatctcatgcaggtgggtcagcatttgtgtccacaaggccctctcttacgagatacctgagattttcaatgctaagagcaggatgagtaccatcagaaaatatggctcagaattcaggaaaccttctacatagaagaaaaagtagataagcaggaaggtatcttcactttgacaaaaaagcctgctgggtccttgaaagtggccacatccagaacaaacataggccctaaatggaaaagagaattgacttaaggagagaaactcttcccactgcctcccagcatgaagacatgaacacttaggttgagctccaaatacatttttaaaaatataaaacaaacacacacacctctctgtgctttatattttgtccaagaacatgatggaaaggcattctgcaggttccagttttctttggacccatttgagcagttctgtgacagcaggtttgtgaaaagcttcagttcttttatgtcgtggaccacttagcgtccatcccctcttctccatgaggaaaggagcatagagcagcctactttagccagccgggattgactcacctgcactgaagactcacctccactgcagcattggagatttgcctaagaatataactagcgtgtatacatacgtacacaaacacgcacacacaatatgtaaatgtattaagatgactgactaggctgggtgtggtgatgcatgcctgtagttatagttgcttgggagactgaggtggaaggaccctttgagcccatggagttgagactgcagtgagctgtgatcacaccactgcactccagcttggatgacagagcgagatcctgtctctaaagaaaatgtcagttatggcacagaaagtcctgtgtcctgggaaacctcacagtcccaggcaaactggggtagttggtcaccccagtgtctgcatttctagaatggacaagcttcatctccccgctcctacttcctggaggctggcacccactgaggctagaaggagaccttctagttgtgtgatcaagcctgagatggagagacattctgtaggcatcacagggagaaggatgtgcacgagatctcactgtctttagatgttttgccccaaagttgcatcaccacaaggcccttggtttaagtcactgtcttttccctactccatccagtagcaaacccagagataacagcatgaagactgacagctgtgtagaggtcgcccagagggcgctggtcctcattctgcctccttactggatgtagtctgaacacaagtgtccaggcccaacagtggctgaagctcttcattcaagactgaatctctgagcaacctggcagcacttagaggggagaacatggcatgtgccacggacagagactgcagctaaattccaagggaggactgaggagcaaggaaacaagagggcccagggaagggaggggtccagagggaagcgtgacaggcaccgaccatgctgttgccatccctgcagggacccagagaagggcaggtgctgtgctgggctccgagagagccctcactgcagagtagatgtgggaaggaatgttggactgtgaggtaacattgggatgggtggcaagggccaggaaagggccacatcttccttccaggtcagcctttcatttattcatcattgatggagtacctactatatgccaggaaccattctaggtattgaagctacaaatatagcagggctgaataatatcctcatattcacatgcacatagaatactgaaagccctcattttctttatatcaaggaatgaaaactctgagtcttcatccttcctggcaagaggaaaatgcaacctcattagttttgaggaattaccccccatctgcaggccccatagaagttgcagggttttaggcagcaccaagcattgaggaggctgccctggccattgccatcaggcaaaggtgcctgtgtgccagggtaagacctgagaggtccaggggctctgctgcaggtgctgtcctgggctccaggaatcactggccaggagctctgggatgcaaggcaggtgtgtcatacaggtgtgtcctaagttgtagccagcgctggggtctctgctgcttatggatcctcttttcccatcctcctcatctatctgctcctaggaggcactcctttcctacagtcctgcagattcaactccattccagctttccaacatcctctcctcgtgttcttcccaccctctgcccacttctaatgtctgccaagttccttcctgtttcaaggtctttgcactttctattccctgtactatcagtgttctttcctggattttgcatggctgtgtcagcctaactttggcctcatttcaattgccatctttacagaagggccttctgtggtcacttgattttaatggtcctcatccttcatcactttctattctacaccgtgtttgcttttcttcatcgtaaaatattgcatcttacgtatgatggtgacttgtttatcacatgtctctcctagaagaatgtaggcaaatgtaggcaaactttgtcttgttcaccactgaatccctggtgacctttccagcctctggcacatagtaggtgctcaataaatacctgttgaatgaaggacgaatgaattcagaaagtctggctgctcccacactaggtacaatacacttagggttcctaactcctgactccgaagcatccctgtgagtagagttgactgactagagaagtggtctgttttattttgtttctggatctcatagaatacatctatttctatcttaattaaaaaataagaagaggcaataaaatgtgctgttacagattggcggggtaaaacaattggcttgacagtaatctaggaatttaattatagcaaaacatgcccatggaatatacatactcaggaagaaagagtttaagagcttcaataaatcattgtttttaaaaacagaagaaggctttgtgatcgtccagttactgctgatgaggccataaagaagctctaagcagcctccatgccatgcatcatgggctctaatgtgcaggtgcctctttagaatggaaagctgcctgggaaaaggctaaaccacgtggttatttgtctcaaatggacaacaatgactcaaagtatggggaagctggttagcgaagctccttcatgactgaccacgtggtcctgcacatctttgactagggtcctaaggagaaagggagaagggcaagaattggcaggaagtggttgcagccccagttgggcagtcacctgggtagacaggttctgggagctcaccaagcacagcaggcctggctgctcttcctccaggttcaggagggctgagggcatccttctggggcccgctttcctgggtatgggtgcagatacagagtggctctgcaggccttcctgttctggcacctccttcatttgtcagctccccagagaggccttttgcctatctacctaaagaactttccattcttgcccctcctcaccacctacccatcaccgtctttaatcttcttcagagcctttatccccatcagaaagtgtcctattgaataattttcttttttgcgctgccaggtctccagtagaatgcaaactccctgaggtccgctgcgctcccaccagtaccttggacagcgctgggctcgcagtaattgtgtgttagcgaatgaacaagtgggcaaggatggaacgctccacctgatcctgaaaccgaacattcatccacaccagtctgctccttaagggagtgcaagtgctcatgacattgatgagttcccagtgagtcgaggctctgaccccaccctgaatctgcagaagggtccacggattgaagtcattatttatttttaatatttatttatttatttatttattgagacagggtcttactctgtcaccaaggctggagagcagtggtgcaataacagctcactgcagactcagcctcctgggctcagtggatccttcaacctcagcctcctggatagccgggagcacaggtgcatgccagcatgcccaggaaatttttgtatatttgtagagatagagtttcaccatgttgcccaggctggaatttttaatcctgtaaacatttgcttggagcccaatcctgtgataaagctcttaccatctacacacacacacatgcgtgtgaaacacagacacgtatacatgtaacacgttattaatagtggagtaatcattagtgtggattgctaaacctttcattaaagagtgcagtaatcattagtgtggattgctaaacctgtctagctttctggctcttgtgcatatggtaggattatacttctggtgttctcactaccctaccccatgcttggatgggtttatgtaaccaaccctagtaatgagttgtgagtggattgacctgtgttactttcatgcctgagcacatccttctggtgtgagaactgaaaaagttctgcccttctttgctgcttggagcaacaaggctctacctactcagcctgtgacctgcttgggtgagagtcccctggtgcagtcctttcactcaaatgatgatgggtatgttgcttagaggagaaataaacctttgctgtttggagccactgtggttaggaagctttttgttactatagcatagcctcgcccaccgtgactaataaaaaatactgttttcttctttatgcaaaaataaagtataacatcaacattttaatatgacagaaacttgttgaactcacccaaattcttactactaagaggtttgtaatgtttcagagtatgtccctatattcttccagggtgtgtgcgtgtgtatgggcatgtagagagaggaaaaggtatgtctatttagatgtgtggacataaatataagagacaaagaaagaggcctctgtatctatgcacctgactctgactttatcattgtggccagtccttagatttccgagtttctaacctgtcaagtaagtgaatttgagcccaaggcggggtctcgatacacccaaggtcttggagtttaagagcagagctgcctgagacaaaaaaacaagtctttgttctcccagaaaggctctctccaccacgactcaccattctctttatttctttgtttcttctgatgatgggggatttttctttttatgcttggagcagggcccaggaaggtatttcaaatatcatcagttcttttgaggcactagtcattctgtgcctgtctttgcacctttccttccctctgattccttgggttttgtgtttatcctcaggctattttgttcttctttagattggaataatttcccagggctcaggtacttctccttgggttaaaccgagcttttttcaaaatgttgcttaaggaccatgggcgtaagcattgcctgggtttctttttgagccttcagatgcctgagccgtctccagacctgctgagatgaaacaccagggctcgggcccgggacccaggcatgcttaactccaggaggagtttcttatgcactctgaagttgaggcccatggaatgggcagtagtgtgataataagccctgtaagtgattattaaacctccgcagtcctgggctcaactttgatcacctgtatggtgatgctgtcatttggtgattagggagtatgaaggtcaagttggaacttcagcagtttcaaagaaactcaagttgaagagggatgataagaatgtgtttgggccgggcgcggtggctcacgcctgtaatcccagcactttgggaggccgaggcgggtggatcatgaggtcaggagatcgagaccatcctggctaacaaggtgaaaccccgtctctactaaaaaatacaaaaaattagccgggcgcggtggcgggcgcctgtagtcccagctactcgggaggctgaggcaggagaatggcgtgaacccaggaagcggagcttgcagtgagcgagattgcgccactgcagtccgcagtccggcctgggagacagagcgagactccgtctcaaaaaaaaaaaaaaaaaaaaaagaatgtgtttgttcctctgttcatgatcttagataggactggcaggagtaagtcccttcccttgcattggacatctgtgcttgcctggcacctgtacctgggaaatggaatgtgtgttttccttttatggaaccacgcttctcctgtttttggtccagggggtttgagagaggctgactccatccctatccataagggaacctccctggacctggcctagacagccagtttttcctgtttctttgactatagtaatttgttcagggatgggcatgactcatcaagcaaagaagacttgagacttgtgcttaggggactccttttttgggaaagagctctctctgccggaacaacaagctgatcagaggtgagcctggtgctgctagtggccaccagaataaagggggaaattgccccagaataaagtcaatgggaatgaatgtaaattgaatgatgacattggggcacctgtatttggcctggtcctaggtcgttgggttatgagagtccattgttttctcatttttaatagaccaatttgtatcaggtttctgtcacaaccaaaagagccctggctgatgcatcttgagtctcactccccaatctgggtttcacagattgcttgtgatgctggcctggtgctcagagctgatggtggtgtttctaaaaggtgattggcagccctgcaggtagtgttcctgtgacactgggccaagtgactcaagatgcccaacgcgttcaccagggatcgtctcacgcaggtggttggtttaactcagcagatggtgccaccagcctcatcctgagccaaaactcagaacagctggtcgccccatctcctgttgcttcccaaggatgcagagaactctacttggagactcttcaaggcctgttcagaggttctgccattcattttctgccaaccacgctggccctggttccagcaaatggctggctgcacctcccctcacaggccctcttgtggaaataggaccaggaagctgcctgcttgggttttagttttgtctttatttataaaaatagagtaaatcaaatatgttgcaaggaattccagtgtgtgaatgataaaacagaaaactcttcctgcaaaacatacagagcattgtggttccaataggctgggaaacgctggttgcaacagagtagatttttgtgctgcaggggcaacgtggtgctgctaactgctaacacacatgggctgtgacctgaccaggcaggggtgccggcagcttttgccaacccaacttgcccataggaccttggcttggagagcgtctctggggattacatgttctgcagagcactccttgagaatgtctcaaggatgaagatgcaaaaggatcttctcccctccctggggtgcatctgtagccttgaaaagtccagcatgagaatcagggttccattgtttaccttgcttatctgccagcttcaggagggcagatgcctgcctgcctcatttgctgctctgtctccagcacctgccacgatgccgatgcgtggttggcactggatggaagcctgttgaaagaggcagtgaatggtgtacggatgaggccacatgtgcttagcatggaagtgaggcgaattgatgcagcaggcaggctttctgtggcctctgaagggccgtggtgtgaagggagggattagttatactccttgtggctttagaaaccagaagtggggtccatgggtgggcttgttgtagaagaggaattcagctcaggataaaataggcttttctagcagttggtagcagctcaacaagcaatgcgctgcctccagagctgggaacatatgaggattattttagaaggatttgtgcctcagatttaggctcgcccactattatttttgatggtaagtctgagtctacaatcatgttgagatagccatgtgttctttccctgtaacttcttaatatatgatttaagctgtttctgaaagctgttggcattgaactccatgtttatcgagtcgacttcaaatatttgaaggtgttggtaatgtttgttatttgccccgagaagccctgaatccatactgctgggtacagtttggctttctttcataatttcaacatatataaaaataagataatacaataaagtgattgaagaaaaaaagtgcttccattttcagcagttcatttacagagtggctgctttcttggtgttgttgagttttagggtgtgtctcccagaagtacaacctgataagaggatgcctgtgcaagggctttatcaagaaagtgatccctggggagactggcaggagggagtaagaacagcacgaggatggggggaagcgagcagggtgtgatctcaggtaaagccatgcagacacagagcaggcttccctgatcccgcaggtggattctggagtctaaaaacatctccatcctgtcaccatcagagacaagatgggggagttgtcacactcatacactgctggagaatgctctagttcttagacagtacttgcgtaagtatcaagagtgaagttccatggtgtctgaactagctctcaaatgctgcagcaaagaaaaaaaaagtagacaaaaagagagaaaagaaaaataaaacagtgtatgcatgctataaatgattcttcagcaaaaatatctctatataaatatctatatatagatacataaagcagacacaatgtggcaaatgagtgtttaagtgaaagtccattgtttcaacttttctataggtttgtaattttccagacaaaaagaagaagaattaaccatgattccaccttccaaaaataaacactgccatttctgttcatattttggtctgtagtatttccttcctactgtgggtgtatgtgtgtaggtgtgtgtgtgtgtagaagatatattgaaagttgctctcagagtgggaaagggtaaaatgaaactatggtgatatttacacagggaacccatgaacacccaaatcctcccttagcccagacactccttcaccataaaacaacacagatcccagtgagctggttcacactagtggcggccttctttacttggtcaaggtttgctggaacgcctgttgtcctcagtaaatccacccaagtccttggtttgatggagtccaggagggtggctggggcagggcacgctagctgcagagccaaggtcttcccagcaaaatgggagaccctggaaccacttgtcccatgaggcctcgcatgcaaaggaagagagaggcggtgattttcttcacaggtcctatggaaggaaaacaagagatgccatgtgctgggaccttggttactttctcaagttttctgaacttaggcaattcttctaaggtacagatcagtgtgtcttgcccttagacccaagtcacctttggggaggaagaaggaagaggctaagcccggagtcttgatgccatcaaagagatgatgggatagccaccacggtgctgtatgtaacctgctttatttatttggttatttgtaagttgatagactttgtttttagggcagtttcagttttacagaaaaaatgagtggaaagtacaaagagttcccacatgccaagttcaccccctaccagtttccctattattaacagcttgcagtactgtgctgcattaggtacaatctgtgagccaatattgatacgctattattaaccaaagcccatagtttgcattagggttcactcttagtgttatacttctgtgggttttgacaaatgtataatgacatgtatccaccattacaggatcatacagagtcgttattgccctaaagaccctctgtgctcggcctgttctttcctttcttcctcccccagaatccttggcaaccactgatcttttcatttccaacataccatgaacattttcttatgccattatatattatttaaaaataagctttttaaagatttactttaatgttctctagttattatatatatttttaaagacatgcattttttaatttcaatgttcattttagatacagggggtacatgtgcagatttgttacatgagtacgttacataccggctgggcacagccgctcatgcctgtaatccaagcactttgggagaccatgagaggatcacttgaggctggcagtgtgagaccggcctgggaaacatagtgagaccccatttctacaaaagaaagttaaaaattagctgggtgtggtggtgcacacctgtagtctcagttactcaggaggctgaagcgggaggattgtttgaactcaggagtttgaggctgcagtgagtcatgattgcaccactgtactccagcctgggcaacagagaaagatcttgtctttaaaaaacaaaaacaaaacacattaaaccatctgtattagttagagttctgtagagggacagaactgatggaatatatatatgtatactcatatatatacactcatatatatactcatatatatacactcacatatatatatatatatatatatatatatatatatatatatatatatatatatgagtttattaagtattaactcacaccatcacaaggtctcacaataggccatctgcaggctgcggagcaaggagagccagtctgagttccaaaactgaagaacttagagtctgatgttcgagggcaggaagcatccagcacaggagaaagatgtaggctgggaggttaggccagactcctttttctgtttttttttttgttttttttttattatactttaaattctagggtacatgtgcacaatgtgcaggtttgttacacatgtatatatgtgccatgttggtgtgctgcacccattaactcgtcatttacatctgggtgggtacaatctaatcagctgccagcatagctagaatataagcaggcagaaaaatgtgaaaaaggagtctgagataccatctcagatgattatattctagctatgctgcttatattctagctatgctgcttatattctagctacgctggcagctgattagattgtacccacccagattaagggtgggtgtgcctttcccatcccaatgactcaaatgttaatctccttcagcaacacccccacagacccagtatcaatactttgtatccttcaatccactcaagttgacaccctgtattaacactcacaccatctacggttgggcatttaggccattttcagtttttcactctactgtcacattgctgtgatgaacatcccttcacatcacggtttcccaacagttgacactttgggaaggataatgctttgtatgggatctgccctgggcatggtgcgatgtgtggcagcacctctggcccctacctcctagatgccagaaacacctaccttcctcccctcagttgcaacaacccaaaatttgtccagaccttgctgaatgcccctggggcaatattgctgctggttgagaaacactgcttgacctccatatatctgcacacatctgattattttctggagctagggtcttgcaagtgggattagtaattcagattgtttaaatatttttaattcttttgatagagttttgtatactgtccttcacagaggtgtttatccatatatgacaacaaattatcctcttctccttccaaggagaggctacttggggaaatggggggagtgtgaggtctcagaggatctgatctgtgatatgcagatgtctggggccatccttggagtgatgggtatgggcagaaagagctctccacaggacaattaagtttgcctgttagtagctttgcccagcaccggcctgaaatcaccaggcagttaaagatgctgatgctatgtcgtgagttgcgatcttttgtaaacctctctttccctctggtcatcacatccctcctggctgaagggagccccaggagggcaggtgatgtggcttggctatgtccccacgcaaatctcatcttgaattgcatcaaatcgttcccataatctccatgcgtcctaggagggaccaggtggaaggtaatttaatcatggaggaggttacagtcttggtgttctcctgatagtaagtgagttctcgtgagatctgagggttttataaggggcttttcccctttttactccctcacttctccttgctgatgccatgtaaagaaggacatgtttgtttccccttccaccatgattgtacgtttcctgaggcctccccagccatgctgaactgtgagtcaattaaacctctttcctttataaattactcagtctcaggtatgtctttgttagcagtgtggaaacagactattacagcaggggaagcagttagtggcctcatagcacagcccagtggcctagcgtgagccccatgaggaactcagccaggctccagtactgggtcctcaaaaggggcagatgaggctgagctggtgactgcacaggcagctgcctgatgagaagggactccttaaaactaatttaacaaaaagtaggtcttccagctggcagtggcttgggcgtgaggaaccagacttgacctgacgtctcacccatgctttgtgaccagccccctccaagccccaccacggccctgcctcgcctgcattttgatccataaacatgaggttttgctcatgattacttcattttcatcaggaagggatttaattaccaggtcaccgagagcagagaaattccagacagcacttcacgcctccaaaatttgctcctagctctcctcccacctgaggtcttaagaacacaaaccctctgcagatctgctgcctcttcctccttatttaggtggcttctcttcaagattcccctttcctctaagtttgctgatttagatcaatctattttcaccagctatgaagcttttccctcctctagtcaatacatgccccttttgatcaatattcttctctctgctaaaattgtgtttgtgtttctgtgttgcaatcttctttgtgcacatgtaccaggagctgtgggtatgtagaagcatgaattgtccacatcccgaatcccctcctggggagtttgctgccccatgtttaaagggaatttacgtccccctcctgccatgagttcccacaatggtcagtcactccagcctcacagccgccctcatatctcactgtgcggatgggaggtggagtccactgtgccactctatgttgggatctgggggtttctcccaacatagactcatggttggggtagctgtgtggagacatcacctctcacttccctcatcctcatgtatccagtgcaggtgtgcaggggcggctgatcctggagaatgtgcttctcctctgcatgtaagggaggctccatctgtaagggtcactggctgtgagctaagccagatccttgcatgccagctttcggtgctcattggtaccagccacagctccttgtgagtgctttaggaacacaagtctcaccttaaccttcttaataaatctcatttggccataaaatagtaggtgctcactaaatatgctacagtagtcccctcttatatgcagggattaatttcttagacctctactagaggcctgaaatcaagtatagtactgaaccctatatataatatgcttttgtcttacaaacacatacctgtgagacaattttatctataaattaggcacagaaggagataaataatatctaataataaaatagaatcctcataacaatgtattttaataaaagttatgtgaatgcagtctctctctctcaaaatagatattgtactgtactcacccttcttcttgtgctgatgtgagacgatgaagcccccaggtgatgagatgaggtgaggtgagtggtgtaggcattgtgagtcactgttaggctgctattgaccttttgaccacaagtcaggagaaagatcatctgcttcgggggatcttggattgtggagccatgacgatgtcctaccgatggaccaatgtcaggaacagaggatgtggatgactaatgcgtgggtagtgtatacagtgtggacgcacttgaggactaaactctgatattttacttctcttgcccaaattcctatctaaggggcctggggagtctgctccacatctctttagaggggtcctatttaacatagctcactttccaaccctactctggtataatatcacattatagataaagaaggaaatcaaaatattttacccctaaatatatttatttgccatattttgaaatgacctgcaaagctatttttgcaggggacaattgtctctgcaaagaatctctattaaaacagctggatctttccccgtcccaggccctcccaatcctgaagagactaactgagcatctggcacctaatagaggcccgaataggaaacatttgccatctactgtctccaagggtggtcacctatgagctttcatctatacaacaagggacttgctctccacgaccccttattttgacccagacacgcctttctagtgattccaggcctttcaataataacttagctttttcatccaattgcccatcagaaaatgtttgaatccacctgtgtcctgtaagactccttttccaagttgtcctacctttccaaacagaagccatgcacacccacatgcactgattgatgcctgacgcctctctcaaacatgtaaaaccaaactgcctgaccaccttggacacatgttctcagaacctcttgagattgtgccctaggccttggtcactcatatttgggcagaataaactgcattaaatattttacagagtttgactccttcccacgacaccctggacaaaggatgatttacatcccaggtgggacagggcaggatggtgcgagatttcatcacgttactcggaatgatgcacaatttacaacttataaattgtttccttctggaattttctaattaatatttccaaaactcagttgtcaccaggtaactgaaaccatgggaaaaaaaaaaaaacctgtggataagcagagggtctactgtaattaagtcatggagaatgctatctcatctccccaaggactactgttttaaatggcattcatttaatagggatcgtccagttttcaatagaagaaaataattacatctcattgcttgagcagggtaacatggttagacaggtctgagtaagagccttatttttaaaacgtatgaaaacaaaactctcttttgtttatgaaaactatttttaatttatattcttgtctacatgcacacaggccaaaccagtgacttggtgcctgcatcatgatcttaacaggacagctgatgagtaaagaagaactcaactctgtagtggggaggtcagaacaagagctcacatgtatcccagtgcctcctgaagccaaaatgagcaaatgcaagatggtgggatgagaggtgatgtttacagatctggatctttctccacaactgtagcctgtgggccctgggaccgagtaaattaagatggaaaccatgtggctggcagcctccgaattggttttattgccatatgatgcctacaccaggggaattgaacaatgtcctggactgagcctgagtcagaaagtgaaactttgacaaaaggtttcataagtttcaaaatgatatataaattcccatggtcccttccgtcaattcactcccagtcaacaccaccaactcctgaaggacatgggggatggagggaaggaagtatcaacagagagtggcaaccttcacagagtgtcctgagtggtctaggtttattcttcagtagtgcagataaactgtgtctaaactctctggggctccaagtgggagcttcaaattcttaaatctagatggacagtcctgtggttctctaggtgtcattcctggacaagcagcagcagatcacctgggaaatttactgggaatgcacattatcagctccccacaggcctcccgaatcagaagcccagggtgagaccagcaatccggctttcatggccagcaggggatcctgatgcatgctcaagtttgagaacaactgggatacacattccacattaccagcattcgtaatcttatttacggagggctctaaatttcctgctaactgaaccactctaaattagctgagaattaaaagaagaaggaatgctattacataaatgaaggctattcaaatctccacgccttgaggaacaacttgagccctggagggcagtggcaggggaggaagtattatagtaactggtggttacagagcagagattgaggccagtcctcctgggtcaagcgcatgcaccgctgcatccagctgcatgatcggggctaagttccttaatctctttgtatcttgtttccttcttccataaaattctcatctatagcgcctaccttatgcagctgttggagggttaaatcagttgagtgaagcatttagaagctttcctggccaagactaagcgctccttgttgttgttagtattatttatctgaattaattttcagttcttctcccatttttaacagatctcaacagtgctcttatcttcttccatagcaacacgtcaaaaaacaaatgcaccatcatcctttccgtttaaattaggaatgtgaccagatttaaggaacagacattcagtttaaacaaatgaaaagttatttttcttgcctcggaatctgaggcctggcagttgctgatgtcttttagtgactcattcatgtgactctcctctaagaccccttccttttagctctgcagagtcagaactgggtcactcgtgggtcagtaggcctggggtgggggatgagaatttaaatggccaacaagtctgcagggactgctgctgctgccagcctgcaggctccgcttaaaagccaatgccttgaatgcatcaggactcatcatctgagactgggaacattgtgccttgaagaaaatcaggatggtgttagcacgagtgaagggggacagatgtgaggtctcaacaggcagcccgagacacatctccttccaacaggctttgtcctgactttccttgctctgatgaggtcaccatccatgtcctaatccccagaattcatggcacacccttgtggataacaatgaccatcctcaagtgcccagaggacacacggaggatgctgagtttcgggggaatatttcatatgatgctggtagtgaaaagaggtttcttcggcctgaaaactggtgttatagtagaaacgtggcacggcagctatagcccgcaggggcttctcctatctctggacatccttcctttctctgcatgacacctctgcatgctggctgagcacctgctgacctcagaggggcatccttctgaggaagtttgtggtcagaccagaaggcataactctcatagaggcaaaatcactttggaaaatacaagtaactttaataaatcccttccaatttgagaacagattatcatgtctttattgaatcccatataaaatgatagaagtttattttcattaaacatggactacgtgccaggcactctaaaataccctaagtaatgcatttaatcttcacaacaacccactgaggaaagtgccagcatcatgcccgtggattggtgagagaactgaggcacagagaggtgaaggaacttgcccaggtcacacagcttgtcagtggtggggccagatttgaatataggtagtctgaatttggtgctgtttctctccaaaatgaaaggtcttggctggcaccttggagtcatattgtaggaaaaacacatatcttcaagtaccggagtcagagactacggtaagctatttccctggaagaggcacaggggaaacagggcagctggggagtcacaggctcacggcccccgctcagctggggagtcaggctcacggcccccgctcagcaggggagtcacagacttacagcccccttcagctggggaaatcacagactcacagcccccactccggctcattgcagacacgtgctcccacaagccccccactccggctcattgcagacacatgctcccagggtggaacagagagttttgcaagtggttctgtcgtccatctctttgtcacttctggatttcctgcacctggaacagtgatcggtgcagaggagttgctccatgtccccgtgttgcagaatgaattagatgatgagcacaacgtcccccacagagcattttacccagggtcttcagtcgcctcctgggtctacttcaccagggtatagttacgctaaatggttttctcaaatatgtttagcgatgccctggtataaacacacctgctgataattttggatatgacatgattggcgactacctcctatcctccaccacagcctcattctgattttcgttttaactctgtaattatgcaaactcaagttttatacgtgattgattttttttccttgcattatggaggaattttcctttgtgtgtacatgtgatagatggaaagagagagataggcaactacatcagcaacacagaacagcaaaatgaccagctactgaactcacaggcatctttttgactagcaaaggataatcagcaaccagcctcactaatttccatgttttaaccccaattaagaaaagtgccttcctgcaggtggtgtcacttcaatcccctccctgaatgtcttcagcctggtagagcccaggtttgtactctcccttaagggtcaagaggccatcatgaaaagctactgagctaagccctggggatgcgaagtgagcaagacgtggtcctgccctcatgagttttacattttaactgggaaaatggaatattgacagcgaagtgcataagcatagaattgcattgtggtcatttctatgaaacgggatggggggcactcctggagcggatcccagtggacccggcctgagtcgtcacttctaaaggatgggtaggaatgtgtcaaagatggggagaagtcattccagggggaggaaaccaaaggcgcgaagcgggagagtgaagtgttcaaagtgccgaagaaggtgttgctgtcatctatccacttcaggctccccagaagtggagcattctccagaggtttggggaaaccaccccatgtgagtcttttggagctggggtcctgtctcccacgaaagggccggacaaggccaggccctggctcccttgcccctgtggtctgtgatgaggttcatgactctgaggcaggggtggggatgttagctcagtgcagtagggactttagagttcatccaggtgatgatgatgcaggtaatggcatctggtggccttagtgccagccaggctccctcggctgctttccccgtcctaagcctggtcctgtagcacccccatcaggcctatgggctctccaatagccttgagcccagcagtaacttcccattgctctgtaacttaagttaaccagaggcagattctcttcttggcagtgcagaaccttgacccttacagaggaccaatgtggctggagcccaggtaggagggagaaagtgcaggacccgtcagccggccagcccctccctgccctgcagggcctcggcagtggcaagctgcgaaagggtttcaaaacacatgggtgtggagcaggccgtataaaaaactcattatttcctgaggcatacagggtttggaaggggactggaaggaggattctattttctctttcttttgaacatctggaactctaaagagtgttactttttaagttgccaccaggaatgatggaagaaacgggttacccatttacaggatgattaccaagctgcagcctgcatgaagtccatttttacagcttgctctgaccccccaaaatgcagagttgataatgacagttggggtaatgctttgagttcaatggcgtagcaataaagaaatctaagtggaaagtgcttctcactcctggctaagtccttctctcagcaaaatttcgcttcaagtatcttttcataataaaataattctgtattccagctgagaactccatgcactcactcgctagtcatgtggcaatagcctgttttttcactgctgggcaggatttgctaatgggcactttatggctaagtgtgttgtccctttgggaaaaaaataattttatcccagcgcatgtctgtctccaagtctactgatcagtggcattattatgcttgcaagagtcatttgtaagcttttcaagtgatatgccaacgtctctcccctcctccggtaaaagagaaaaaatgctaaaagcaaaaagctagatctcccaggggacggggggaagcgtccttgccatcaaatcgatctttatcttacatgtgttataaatcaggatatgccctgcttgctgctgtttttgtgcatgttcccaaaggcagcctagctattaaataagagcagaagtggtctcagaagagaattcaagttcctgtctcactccttagctgtcagattgagagaaagggccccaaactctgagccgtgattttctcatctgtgaaaagggaacagtaaggatatttggtttttaggatgattgtgaagattaaatgacataataaagtctaaaaagcactgagcattattttgagtacagaagaaatgctactttgcagttgtctctgctttttctttcttcagtaggtgcaatttttgcaaatgcctcaatattcaatggatagtctatgttcgagagtattcttctcacctatgctgttaatcacaagccaatttggggacaagacagagataaacatctgtatctttattttttcttaaaacattgctgaatttcttaaaaacaaaactttcctgaaatttgcttgttatgtgctgagaactaacacatactcagtccttactgacagtgactgtctgtgagaggtttgtgtgtgtgtggtgtggatgttcttatgaacattttcatagatggataagctgatattcaagaggttgagtaacctgcctagggttgccactgaagtaagagtcaaacaaggcgatgaattaaggtgcttgagaagccgagtttcttcttaatcttaaaacatcctcccagcttctctgccattctttggtgctctcattcctaaaggaagataaccccaatttagaatatgtaggtcagcatgacaggtggtctggaaatgggtcattagaatgtcagatattctggcaacagtgtttctcaaattcagccatgcgggctgccaggtccacgtctcctgcccccatgaagtgaacttgagctttcttgttggtggctcttgaacgagagaccaaacaaggcactgacccgccgtagttgttgtcaagcaactcatgtaagcccaaaaccaccaagggaatgtccttcccacaggtgagctagtgtggggtcctaagcttgacttgttcatggtggctgccaccagaccagaggggaaaactgagtaaaaaccatcctatattcactaataaaatataatacagaagtatatttgtcttttataaaacttcttacccaatacatttagtgaactcagttattttttttttcaccttattaggcaggaataacattgatcccaaagctagttagggaacaaataagaaaaaaggtattataggaaaatcacttttgattaattagatgtgaaaattctttaaaatttttttttattattatactttgagttctgggttacatgtgcagaatgtgcagtcttgttacttaggtatacacgtgccctggtggtttgctgcacctatcaacccatcacctacattaggtatttctctcccctagcccccaaccccctgacaggccccggtgtatgatgttccccaccctgtgtccatgtgttctcattgatcaactcccacttatgagtgagaacatgcagtgtttggttttctgatcttgtgatagttttctgaggatgatggtttccagcttcatccgtgtccctgtaaaggacatgaactcatccttttttatggctacatagcattccatggtgtatatgtgccacattttcttaattcagtctatcattgataggcatttgggttggctccaagtctttgctattgtgaatagtgccgcaataaacatgtgtgtgcatgtgtctttatcgtagaatgatatctaatcctttgggtatatgcccagtaatgggattgctgggtcaaatgatatttccagttctaggtccttgaggaattgccacactgtcttccacaatggttgaactaatttacactcccaccgacagtgtaaaagcgttcctatttttccacaacctctccagcatctgttgtttcctgactttttaatgatggcccttctaactggcatgagatgatatctcatttggttttgatttgcacttctctaatgatcaatgatgatgagcattttttcatatgtctgttggctgcataaatgtcttcttttgagaagtgtctgtttgtatcctttgcccattttttgatggggttgtttgttttattcttgtaaatttgtttaagttccttgtagattctggatattagccctttgtcagctggatagattgcaaaatttttctcccattctgtaggttgcctgttcatgctgatggcagcttcttttgctgtgcagaagctctttagtttaattagatcccatttgttaattttggcttttgttgccattgcttttggtgttttagaaatgaagtctttgcccatgcctatgtcctgaatggtattgcccaggttttcttctaggatttttatggtcctaggtcttacatttaagtctttgatccatcttgagttgatttttgtaaaaggtgtaaggaaggtgtccagtttcagttttctgcatatggctagccagtattcccaacaccatttattaaatagggaatcttttccccattgcttgtgcgtgtcagatttgccaaagatcagatggttgtagctgtgcagtgttatttctgaggcctctgttctgttccattggcctatatatctgtttgggtaccagtaccatgctgttttagttactgtagccttgtagtatagtttgaagtcaggtagcgtgatagctccagctttgttcttcttgcccaggattgtcttggctatgcagtctctttttttggttctatatgaagtttaaagtagttttttccaattctgtgaagaaagtcactggtagcttgtagttctccttgaagagatccttcacatcccttgtaagttgtattcctaggtattttattctcttagcagcaattgtgaatgggagttcactcatgatttggctctctgtttgtctgttattaatgtataggaatacttgtgttttttgcacattgattttgtatactgagactttgctgaagttgcttatcagcttaaggaggttttgggccgagacgatggggttttctaaatatacaatcatgtcatctgcaaacagagacaatatgacttcctgtcttcctatttgaataccctttattgctttctcttgcctgattgccctgcccagaacttccaatactatgttaaataggagtggtgagagaggggcatccttgtcctgcgccggttttcaaagggaatcattccagtttttgcccattcagtatgatattggctgtgggtttgtcataaatagctcttattattttgagatatgttccattgatacctagtttactgagaatttttagcatgaggagtgttgaattttatcgaagaccttttctgcatctattgagataatcatgtggtttttgttattggttctgtttatgtgatggattacatttattgatttgcatttgttgaacagctgtaaattctagtaagttctagtagagttgaatttgctcctgaccaagctttctgatgatcttacaagtcactactgtgatctgtagttggagggattatcatggaggaaatgtggatagttcaagctcattgccaattaatatggtttagatctgtgtccgtgcccaaatttcatgatgaattgtagtccccaatgttgcaggtagggcctggtgggaaatgattgaatcctgggggtggatttctccctttgtgctgttctcctgacagtgggtgagttctcatgagatcttgacatttaaaagtgtgtggcacctccctcgtccctcctcctgttacagtcatgtaaaggctgccgctcccttcaccctccaccatgatcgaaagtttcctgagacctccccaaaagccaagcagatgccagcattatgcttcttgtatagcttcctatgagccaattaaacctattttctttataaactactcagtctcaggtatttatagctgtgggaggatgggctaatacaccaatcaactacgataaagttggaggacagggtgggacaggggaatatgtctactgtttctgacatggtccctctaatcttccgaaacagtgattctcaactggggacgattcccctcccaaccaggagacatttggcaacatctggagacatttttagttgtcacaagggggaggggggtgctcttggcgtctagtgagtggagtccagggaggctgctaaacatcctacaatgcactggactgaccctcacaacaaagaataatctggctccaaatgtccatagttcaaagattgagaaatcctgtttgaagtttaaaaacaaaaagctgatcatcaaaaatctagaattgtccactgaaaaggtcaattttactgtatatcaatttaagagtagaaaaataaaacattatcacacaggcctctagatttaattaccaattcacagaaagtgcagaagagtaggacttgttaaaatgaggccaggaggatgcaatttgcaaaatctagactttagaaaagtctatagtacatgtgaccttaccaaaccctgtaagaaaataaaagacaagatacatatcaatgaattgcaatgtatagacctcatttctaaaaaccaaactaaaaaagtcattcttcgatgttcacaggggattggttccaggacaaccttccacccccaacccccaacaccaaaatgtgtgaatgctcaatcctctagcataaaatttgcatgtaacctacacacatcctcccatacactttaaatcatctctagattacttgcaatacctaacacagtataaatgttatatagttgatatattgtattgttttttatttgtatttttattgttgcattgttacgttttattttcttcaactagttttgatctgcatttgcttgaatctatggacgtagaacccacacagatacaaaggccactggatataagatgattaaggaggtgaacagaaactgaatatctcatggtgttaaaacattattgtttttaatgcagtatcatattgtggttaggtataaaggagtctctgtcttttagcgatatattttgatatacccacagaagaaattatgtttgaattctgtttcaaaataattggagggaggagagtctgtgattacagatggaactaaattggcatgagttgatcccagttgatgaatgcatggggctcaatattctttctctgtacttttgcctatgtttggaattttccatactaaaatgttttcaaaaacaaacagtgccaaaagccgagttacatcggccaaattctcacagctcaggcaatgctatctaactcagacgggccctacatgtctgttctcctcacagtaccccacgagaccaccgaggggcctccttggcttccacagaggacactgggacttggagtttgagcaattgcctgtgtgggtgggtgcgttagtggtggggctggaattcaagctcagatccttctgccccccaaatcctggttctttctggtctgccctgttgcccacctcctgcagaaggcaggtgttgctgtgcagggtgggcggcagcctatgctgatcagctcccttctaaagctgcacataagccctccttgtcacctggtatttagacagctgaaccttaaggaatcacaacataatgcctgatttctaccctgggaactgcaaactaattccaggtcgaaatgtaaatattgtccccatggagaagaggtggttttagctgcttataaatgggaaatgctggcagctgttaatattgatagttattccctgaaaaatgacttcaaggttctactaatcaattgtctctcagaatgaagaacggcgcactctgctctcccggaatcacaacatgtatttataaatacatgcttcacagaacagacaggaaaaatgagccaagtctttggcatgatgatctgttattcagagtgaagaaagcaattattagcatctatattggactttgaatttacaaaattctttctttaaaaaaaatggccattgcagctattttgtgtttccgttgtttgatcttcaattaggtatactgaattgtgctacttggcattggattgaaagttaacaagggctgggactgtttttttttttttttttttctcacttggtaaataagtagctttgcacttggctagaaacatctggatgatttaggcactggcttgtaacaatgtttgctttgccatgtcctcctagaactgatgtttgcatgaaaggctcatggcaatgagtttcttactcagcctggatttaatgtgagatgtatgagggagcttttggttctctctcttcaaaactcttctgggaactgggatctggagaggtgtgaattggattctaagatgatctcttgttgtaatccctgcccttgaaagtgggtgtgactggtaacttgcttttagcaattgaaaatggcaaaggggatggaatgtcatttatgtaattgtgttacaatagatggcaacatctgtcttgctaggagaccctctctcccttgctagctttgagaacaaccccaccccccgaccatgctaaggatgcttctgtggcaggaactgtgggcatcctctgggtaacagccagcaagggagacctcagtctgacagctgcaagggagtgtggctgccatccaaccatgtgaactcagagacgaaccctgccacaagcaagccactgtgggcaccttgattgcagcctttgagagacccggaagcagagagagggcccagctaagctgtgctggactcctggcccacagaaaccacgagatcataaaaatgtgttgttttagggaactagtttgtggtcagttgttacacagcaataaactgatagagcaggtaaaataacccactgtggttacccaggtagttaatggtagaccagggactaaaattaatttcactttactctttctgagagtttgctcaaggcaaaatttttaggctcctgatgtaaagcaaggagattagctggtggagttagtgatggaaaatgaataagtgttgagggtaagaactttaagaactcttctagcacattcccaatttacctttttacgaaagtagaagacttctgaggatcaaatatcatatcccaatatctcagcacttactatagcctaggatttttgagaaaactaacttatttaatcctcaaaataaccatatttattctatattatttatgcctatctatattattatgcttaaaagaaaactaatgtccagagagatgcaatgacttgaaacattttatgcaggtggtgagcagtctgacaccatagtccggctctcaacctccacaacctgcaggtccattttagtaaaataaaactgcctggcacatagttataaagtgggcacaagatcgtattccagtgttatgaatgagtgaacacactgcagatatgtggggacttgggtgtgcaggtgggttgtaaaatgtgcctgggatttggcttaagcaggtatgataacacatgcagacacagaaatgattgtcattaagaaagaagttgtattatgctcaaggtcctgagagacagggagcagactcaccatgtggggccatggggagaagcacgaagggagatgagcgggcagcgggaaggaggagctgcagtgggaaccttcactgtgttttcatgggaaggaatgggagaaacaaagtgagcaagtggggcaggctttgcattggaagttttgaataattctggcagtctctgagctataggagtgataaggtttggctacatccccacccaaatctcacatcgaattgtaataatcacctgtcaagggcagggccaggtggagataattgaatcatgggggcggtttcccccatactgttctcatggtagtgaataagtctcacgagatccgatggttttataaatgagagttcctgtgtacacgctctcttgcctgctgccgtgtaagatgtgactttgctcttcatttaccttctgccgtgattatgaggcctccacagccacgtgaaactgtgagtccattaaacctctttcctttgtaaattacccagtctcaggtatgtctttattagcagtgtgagaacagactaatatgaggaacttatcctagttgtttggtatctagctctggggtgattaggggaggagaattgtgtctcagacttcaggagcttaagaagatgtgggtatgaactttgactgatttgcatatgcaaagtgtgctctcaggcaagacattcgctatctaggaattagctaaccctaggagaagtggtccttttccaggtccccaaggcctcagatgccagagcatcagcaatagagaaaataagaaaatatagttaacataagatgctataatgccatacgagctgttgacaaagcattggcaatagttaggagatcagactctttctaagttatgaaagagcactgcagaaaagttaattcctggccagcggtggtggctcatgcctgtaatcccagcactttgggaggccgaggcgggtggattacctgaggttgggagttcaagaccagccggaccaacatggagaagccccatttctactgaaaatacaaaattagctgggcgtggtggtgcatgcctgtaatcctagctactcaagaggctgaggcaggagaatcgcttgaaccttggaggtgggggttgcggtgagccgagatcgtgccattgcattccacgctgggcaataagagcaaaactccatctcaaaaaaaaaaaaaaaaaaaagttaattccttacagatgaactcgggtctttggggccaaaggcatcactgtgtcactcttattccaagcacagatagtgagatgagagattgcaactcctccctcctctgaaacagtgacattatgtttacatgtttagaaaaacacagtggctatctccattcttaggtaatgtgtgtttgatcattcttgttgtttttctgtgcttaaatacaaccattgcttttagagacccctgattggccctttgtcataataagcactgacaatgatttctaaagtatagcctcctctctctttaagggattgaatgctcgacatccaatactctcctgacttacaaagttagccagtgcatgctttgtttttggtgcatcttccagaaaactcacccgtctatttacccattaggttagttacattcatcatgaactgtggaaggtgaatgttggaaaatgacaagattcctctaagaagtctattacgaagcccagcttttcttccctttcaagtctataacccattttttttttctacaaagaagaatacatcgttttctttttaatgtggtgtgaatatagaaagactggaaactgtgtctgggcatcaaaaccagaaaatcaccctgcctcccatccccagcatcagaaatcctgtcatttgcagcaacatgggtaaaactgcaggtcattatgttaagtgaaataaggcaagcacagaaagacaaatattgcatgttctcactcatatatgagagctacaaaagcaggttttgtgaagataatagattggtggttaccagaagccaagaagagctggtgggggcaaaggggaaggttgaagagagactgattaataggtatacctacacagtttgatagaagaaataagacctactgttcgataggtcagtagggtgactatagtttacaataatctattgtatatttcaaaatagctagaagaaaataattccaatatttctagcataatgaaaagatatttaacatgatgaataccctaattatactgatttgatttttacaaattatatgaatgcattaagttatcatatgtaccccccaaataggtacatttattatgtatcaaaaaataaaataaaaaagataagtctctaaagtcttccccgtaaatatattgcaaggcatagaaacatacagttaagaagcaaaaggaagttgacaaaaagatgcaaccatgtcaaatgcttcctgaattaatccacaaaatgtatggagaagatctaaaaaacttagaatgtctcttagggtagactgttttatctgcaagtcagagtgctgatgccaggcattctccaacatggtctgttcacatcccatcttcattcattcactcatttatttcttcaactgacaaatgcttattgagcaccaactgcatgttttacatgattcaggtgctgaggagaaagcagtgagcaatcatttcctaccttcacagggcttactttctgatgacgggcacagccattggaatctgttctgctccaggaccccagagaccaccattctgcaaatttccttgatacttcttgatgcaccacacttaactatgtggggcattcctcctttttgaaacacccttctcttttggaccagagagaaggcgatggtgtggtataattctagagaggtaggtaggatccagaccatttgggatgtcattggtcacagtggaggtttttttttttttttgaaaaataaatggaaactaaactatcttaatcaggagcatgtttctctcttatttgtttttatttaaagacatgatgtctttaatgtggatgtggcaagggaggaggaagaaggatctcttaaatgtcttctggagtacaaaccaggccagaagtagtagtagtttatcagcagagggaagaaggtgagggaacctggaaaaaattcagaagcagtggcatgctggtaaatgttaacaactatttctctaagagaaaaaagatagcaatttctggcatttactaatttcaagcaaccaagttgacatcattgaatgcagatttcaggagagatgcacaaaatagctggaatgagccggcttcgtcacagcacgctcttagaaggggaaatggacaacacatggtgatgaattgggtgtggggaatgaaggggagaaagaggtgccaagaatgactggtagcttctgatttgctgaataggatgaatgatggaactgtccacaggtagaaacaatgaagaggaacagatgtgggggaaaaagacccgtgaagccaacaataatgggggagtattagtcaaagttatcagggaccggcaatctgaatggggacccagagcctgagtggatggtatatcaattcaaattgtgtgtcaacatttttaggtctacgcttaccaagagctccatgaattttttttaacccaggatggaattctattatgattattttgcaagcctattgaatttgaagcttttgtgagatgtcctagagggtgggtcaagaaggtggtgggatatgccagctaaaaatcagaggagtgttcaggtatggtggttcatgcctgtaaccccaacacttgaggccaagagtttgagaccaacctggacagcataatgggaccccatttatataagaaattttaaaaaataggcatgcatggtggtgcatgcctgtaattctagctggaaggctgaggtgggagaatcaattgagcccaggaattcgaggcacttgagcccaagaatttgagtgcagtgagctataagcatgccattgccctctagcctggacaagaccctgtctccgttttttaaaaagaatagagaaaaagaaaataagaggagtgatcttggctgaagatatacatatgagaatcatacaggtgtaagtaaaatggagaggagattacctagcctgaaagtaaaaacttcacctgtgaatggggtctccaatctctccttttctctccctctttcttctatgaatgcagcatttactgtctgggtcaaagaggatgtgtcctaaaaggagaatgagaaataaaacccagaaggagaaagaaaacgtggagaatattgctgattgcagccaagggaagagaatgtttccagaaggaggttaccactgcgaggtcaagtaagggactggagaatgcttctgtatcttggcaggtggggccattggagggagtagttgtgaccaggtgaagggctgaggggcagagcagagtagagtgaggagtaaatgtgagataagaaaatggatcaggggaatagtcttatatttcaagagatgacagctagattggacactcaagtaaaatgtgagaaattttttaaacagaaaatacttgagctatttaacattgatgaaaatgatccagttaaaatatgcaagcaagaaagggacatgaaaattgcagagtaaagacctctgaaaattccctcttccataaaaaaagaaacttgcagaaaagatcagaataagctttttcagaattcgagaaattaaccaaagcttgcagcaatgcaggaagggtttgttttttccccaagaaaagtggctgaatctcagtaagaagattgagctttgtggtattttaattttccattgtctcatctcccactctccaattccataatgatcttgaaaaatagcagctcacatccccagtgcaaactgaaagtcactagagaatgcagaggggagctagaactcttcaaagcctcattctcaaggaactgtcacttgtgacatgtcaggtaatccctggaagacccttcttacaaggctgtctgtatgtgattgatttggagcttacacagtaggaaaaacctcctctctaggggtgattatttaaaataattactggcagttcttttaactttgtagctgcctaaggtggtagataaccatttatgtaaaagtattctaacaaaaacctttaaaaggaaatgctaaaactcctaaaattcaacattgagaaaacaaataattcaattaaaaagagggcacaagatttgaacaggcacttcaccgaagaagataacagatggaaaagaagcaaacaagaagacgttcaacatcatatgtcattagggaattaaaaatgaaaaaaatgatgagtttccaccgcactcctattagaatggttaaaattcaaaacaacaccaacacaaaatgttggtgaggctatggagtaacaggaattctcatttatttcctaggagtaacgcgaataaaaagcaatgggacagacactttggaagacagtttggcagtttcttacaaaagaagaaattggcccaatgtgacagtcatgtcctactacttggcacttgtattccttggtatttgcacaattgatttgaaagcttatatccacacagaaacgtgcacacaaatgattataacaactttattaataattgccaaaaacagaaagaaagcaagttgttcttcagtaggtgaatgaacaaaaaattgtactacattcgtacaatggagtcttattcatccttaagatgaaatgagctatcaagctataaaaaacattggggggggggatcatagatgcatattgctaggtgaaataagtcagtctaaaaagcctacatactatatgattccaaccatatgacattctaaaataggaagaacaatggagatagtaaaaaggatagtagatgctgggggccagggggcagtatgaagagagaagatgagtaagtggaacgtaggggatttttagggaagtaaaattattttgtataatactgtgatggtgaatacctgatattatgcatctgacatcatgcagtgggcatatagaagcccatcaacaatacaatacaaatggtaaaccttagtgtaaactatagactttaggcaacactaataatgtataaatattggttcaccaattgtaacaaaactaccacagtgatgcaataagtttatatttgtggaaactatgtgagaagagggaggaggagtatatgggaactctctgtacttttatgttctattttcatataaactgaaaactgctctaaaaaataaatcctactaagtaaaaacataaaaaggaaacatggagcaatgagaaatccatagaggttttgaaaagctctgaaagtattcctggaaaaatagaggaccatgcacatacatagagcatgaacatgttcaggaaagacctaaaaagaccctaaggtctcacttctggctgatcttgagaatatgtgtgacagcaagtgaaggctaaggcagagttgttaattacctggctgagtgttgaaggcatacccctacaagtaaacagtggctctcagcaacacttagagatatattgactccatctatttaaatatgtctatgtccagtagttagctaaccactaaagacttcggtgatcaaacacaacaatgaatacagactgttcagaattagttcagaaaagtcactaaactaaacaaacaaaaaaaacaaacccagcaactacaataagcagcaattgcagaccctggggacagaagagggcaaagagagaatctgatatctactattgctacattatattatttaaacatcaagttttaaaaaaataagagaaaaaagaatgtatgacccatacacaagaaggaaaaaagcaatcaatagaaactatccctgaaagaatgtagatgttgaatttactaaagagagactttaaattagttatttaaaataaattgaaaataatatagaaaatagcaaaatggaagatgcaaaatggcagaggtaaatccaatagtattagtaattacactaattggaaatggattaaattctctaatcaaaaggcagagattgacttaatggataaaaaacataatccaactatatgctttctacaagaaacataatttagattcaaagacaaaagtatgtttcaaatcaaaagatgaaaaaagatctatagtgcaaacagtaacaaaaggagatctggaaaagcatatactatgcaaacgtaagcaaaagagagctggaaaaagatacttcatgcaaactgtaaccaaaatagaattgaggtggatatactaatattaaaatagattttaggacaaatatttgtagtaaatacagagaaaaatacttgataatgataaaagaatggattcaaaaagaagatataataattataaatgtatgaaccaagtaacaaactcttaaaatacatgaaggaggaattgattaaattgaagggagaaatataaaattcaacaatagtcagaaacctcaataccccactttcaatgatggacataacaactagacaaaagatcatctaggaaataaaagagttgaacagtactataaacaattaggcataagacatagctatagaatagtccacccaacaatagcataatacacattatttccaagtgtacgtggaaaattctcaaggatagattacattttaggccataaaacaagtttcaatatatttaaaagaactgaaatcataacaaatctccttcaacaacgattgaaattagaaatgtaaacaacacactcctaaatagccaacaggttaaagaaatagtcacagtgaaattagaaaatactttaaaattaaaaccctacataccaaaatttatggaatgcagttgaagtagtgcttagagaaaaatttacagaaatcaatgcctacattggaaaagaataaaggtctgtcttaaatcaataacctagcttaaaaaacctaggaaaacaagagcaaactaatcagaaagcaagcaaaaaaggaaataatagaagagcaaaataaataaaatgggtcataggacattatgttaagtgaaattctcagacacagaaagacaaatagtacgtgatctcactcatactcatctagaaaaggtcaatattagttactgttacagaagtagtgtgtggaatggtggttatcagggggtgtggtgaagggtagtggtggggagatgtttgtcgaaggaaacaaaatttcaatttgttgggaggaataagtccaagagatgtagtgtacaacatgatgactatagtgaacagtatactgtattatcagaaaatgtaagagtggatttaaagtgttctcaccacaaaaatgacagctatgtgaggaatgtatgtcattccacagtgtttattatatgcacttcgagacattgttatacatgataaatatatacaaattttatttgttaatttaaaaatagagaataacaaaacaaaactttttttaatattaacaaatggataagtctctagctggactagcaagaaataaagagaaaaggctcaaacttacagatataaaaaggattataaagaagtattatgaacagttgtaagccaataaagtaggtaactcatataaaattaacaatttctggaaagacaccaactatcgaaactgactcaagaaaaaatagacaccgaaatagacctaaaacaagcaaagagattaaattagtaatcaagaaaccacacacaaagacaggtccagcagacggtttcacctcttaattctactagacatttaaataataattaatagtaatttttcacaaacattttcaaaaaatagaagagagaacagttcccattcattctctgaggctattactataccaatactacacaggaaaaggcatcataagaaaagaaaactataaagcaatatatcttataaataaaaatgtaaaaatccttaataaaatatttgtgtattgaatctgttaacatcaaaaatattccacaccatgaccaagtgggatttatcccaggatgcaaggtttggtttaatgtgtgaaaattaatctttgtaatgtactagtcgaataaaataaacaaaatccacatggtcatctcaataaatactgaaggcatttgacaaaatctagcattctttggtgatgaaaacactcaactaactagcgatagaagggaaccacctcaacttgatagagaatatctatgaaaaaaccacaactaacattatacttaatggtgaaagaccagaccttccccctaagaccaggaaaaatacaaggatggctgctttcactatttccattcaacaccatactggacattctagagaggaaaattaggcaagaaaatgaaataaaagacatctagattggaaaggaagaagtaaaagcatctctacttatagatgagttgattttatatgtagaaaatcctgagaaatccattaaaaatctcataaactagttaagcgaggtttcagaatacaagatcaatatatgaaaaacagttgtacttttctcagatttttattttaggttcagggtcacatgtgcaggtttgttatacaggtaaactcatgttatggagttttttgtacagattattttgtcatccaggtactaagcctagtacccaatagttattttttctgctgctgtctctcctcccgcccttcatcaagtaggccccagtgtctgctgttttcttctttgtatccatgagttctcatcgtttatctctcatttataagtgagaacatgcggtatttggttttctgttcctgtgttagtttgttaagcataatggccttcaactccatccgtgttcccacaaaagacacatatattttcatatacttgcaatgaacaatctaaaaatgaaattaagaaaacaattccatttgcaataccaccaaaaagaacaaaatatttaagaataataacaaaagaggtgtaaaactcatgctctgaaaacaacaaaactgtgttgaaggaaatttcagaagagccaaacaaatggaaaaaatgtatgttcatggacaggaagaagtggtattgttatgacggcaatacagcccaaattgatttataggttaaaagcaatcccaatcagtatgcataccttttaacaagctgtttctaaactttatatggaattgtgatgaaccataaatatcgaaaacagttttgaagaagaagaatcaaataggcagactcacttcttgacttcaaaacttactacaatgaaatggtcatcaagaaagtatggtcctggcataaggatagacgtatagataaatggagtaaaagtgagagtccagaaataaaaccttgtgtctatggtcaactgaattttgacaaggatgtcaaaactattcaatagagaaaaaagagtcttaccaacaaatggtttagggacagccatatgccaaagaatgaaatgggactcttccctctcaccgaacacaaataggaactcaaagtagtttaaaggcctaaatgtaagaactaaaattataaatcttttagaataagtcataggggaaaatcttcccaatctcagatatgataaaatactcttagatatgacaataaaagtatgaacagcaaaataaaaaaatcaataatttggacttatcaaaattctaaaagtttttgcatcaaaagatactatcaagaaagtgaaaagtcaataaacggtatgggagaaaatatttgcaaatactatatctcataaaggacttatatctagaatatataagaacacttataatcaagaacaagaatataaataacccaatttaaaaatgagcaaagtatgtaaatgcacgtttttgcaaagaagatataaaaatgtccaatacggacatgaaggatactcgacatcattagtaatcaaggaaacgctaatcaaatccacaatatgataccacttcacatccactaagatgactataatcaagaatcagaaaataacaagtgttactgaggatgtagaaaaaataaaaccattatatactgctagtgtggtgcagctccttggaaagtagtctggaaattcctcaaatacttaaacatagagttaccttatgattcagcaattccttcctaagtatatgctcaagaaacataaaaacatatatccatacaaaatcttgtacacaaatgtttagcattctgtcattcataatagcaaaaaggagtaaacaactcaaatgtccatcaactgacacatggataaataaaatgtggcatatccatacaacagaatattattcagcaatcaaaaggaatggagtactgatacattcttaatcatggatgaaacttgaaagcattatgctaagtgaaagaatctcgtcagaaaatgtcacatattatgagctattcatttgaagtatacagaacaggaaaatttatagggacataaagcagaatagtggttgcttagggtttgggagtgagaaggtatggtggtgataggtaaggtcgtggggtttcttttggacatgatgaaaatattctaaattgactatattgatggctgcatgtgtctgtaaatatgctgaaaatctgactggagcactttcagtgggtgaattctatgctaagtgaattatgttgcaataaaactgttgatataagaagtatagaatctgagtatacctataacaagtaaagagatttaattagcagtaataataataataataacttatcacaaacaaaagctcaggattagatggcttcacgggtaattctaccaaatatttaaagaagaattggcatcagtactacacaaacacttccaaatatagacgaggaaggcatacttcccatgtcattccatgagatctgtgttatgctgattctaaacccgacaaataaatcatgagaaaagaaaatgatataccaatatcccatatgaccatatacacaaaaatccaaaaaaacactagcatgctgaatctagcaccatagtaaaaatattatataccatgactaagtgagatttatcccaggatgcaaggttggtttgttacatgaaaattaatcaatgtaatacaccatttaatagaataaagaatgaaaacaacatggtcatctcaataaatgtgcaaaagcatttgacaaaagccaataccctttcatgataataacattcaagaaattaggaatagaaaaaacttcctcagcaagataaaaggcatttatcaaaaatccacagctgataaaatcctcagtggtgaaagactgaaactttctctctgagatcatatacaatacaaggataaccactctcatcatttgtatttaacattgaactagagtttttagagaggaaattcaggcaaaaaataaaattaaagacatccagacaagaaagaaagaagtcaaactatttccatttgtagatgaaacaatcttataaacaaaaaatcctaaggaacacacacacacacacacacacacacacacacacacacacacacacacaattagaactaatgaatgacttcaacaatgttgcaggatataagataaatattaaaaattagttgtatttctatacacttgcaatcaacgattagaaagtaacttcaagaaaattccatgtataatagcatcaagatgataaaaatatttagcaataaatttaacaaaagaactgaaaaccatgaaacagtgttgaaataatttaaagatgcaaataaatggataaatattccatgttcatgaactggtagaattagtattgttaagacaaaaatactccctgaattaatctttagagctgatgtaatccctgtacaaatttcaactgtcattttttcagaaattgagaagctgatcttaaaattcacatagaaattcaaaagacctacaataaacaaaacaatcttgaaaaagaaggaagtaggagaactcacatttctcaattccaaaacttaatacaaagctacagtaatcaagacagtgtggcataagcatagacatatacatcagtagactagaattgagaatctagaagtaaaccgatacgtctatgttcatttgtttttgacaagaataatctttaaaacacatgatgttgggataattgaatagttgcatgccaaagaatgaagttgggcctttacctctcaaatcatgtacaaaaattatttcaagatggcttaattatctttattatttctttccttctagtgattttggttttggtttgttcttttctaattccttgaagttcatctttgggttgttttttgaaatctttctagatttttgatgtaggcatttgttgctataaatatgtctcttaacactgcttttgctgtgtcccatacgttttggtatgctgtgcttctatttttatttgtttcaagaaatgtttaaatttcattcttaatttcttccttcatccataggttgtttgggagcctgttgtttaattgcatgttcgtactcacatgtggaagctaaacaaaagttgatctcatagaaataaaatgaatataggatactagagactgggaagggggaagggaagggacatggttaggaagagatttgttacaggacacaaagttacagctagagaggaaggatcagttccagtgttccataacactgtaagatgactgttgttaacaataaaatattacatagtttcaaatagctacaaggaggatattgaatgttcctaacacaaacgaatgacaaatgtttcagatgatggctatgctaattaccctggtctgattactgtgcattatatgaattgaaacatcactatgtaccctgtgaatatattcaattattatttgtacattaaaaattaaattaaaaaataaagtactagcttttaacaaatggcttattgagttttatagagctaaaacgatgaaattcttagaaaaaaaccagcacgtaagtctctgtgaacttgtattagacaacggtttcttagatgtagcacctaacagaaaagcaagtaataaaagattgataagttggacttcatcaaattttaaaacttttatgtgtcaaaaatgctattatgaaagtgaaaaaagaacccatatagtaagagaaaaatatttatgattcttatttctcataagaatctagtagtcagaatacagaaagcactctaaaagctcaacaataaaaagacaaataatccagtaaaagttgggaaaatatctagctagacatgtcttcaaagaaatatacaagtggcaaacaaacacatgaaaggctgctcaacatcattagttatttcggaaaagcaaatcaacgtcctcatgaaattccatttcgaaccactgcatgggcttaataaagaacaaatggctgggcacagtggctcacgcctgtaatcccagcactttgggaggccgaggcagccagatcacctgaagtcaggagtttgagaccagcctggccaacatggtgaaaccccatctctactaaaaatacaaaaattagccgggcgtggtggcgggcacctgtaatctcagatactcgggaggctgaggcaggagaatcacttgaacccaggaggcagaggttgcagtcagctgagatcatgccactgcactccagcctgggggatagagtgagagtctgtctcaaaaaaaaaaaaaaaaaaaaaaagggaaaatgacatgtaggtgaggatgtgaagaaactggaactctcatacattgctgatgggaatgtaaaatggtacaaacaactttggaaaacagtctggtagtttttgaaaatgttaaacatagagttacatctgtgtaacttggcaatttcactcctagaaatataaacaagagaaatgaaatgaaaatatatgctcacaaaaactggtacatgaatgttcacagcagcattgtttaaaatagccaaaatccagaaaccacaccaatgttccaaatgtccatcgactgatgaatggataaataaatgtggatgttcatacactgaaatattatttcaccaaaaataaaggaataaattcctggtatatgtgcaccatggatgaatcttaaaaatatgctgagtgaaataacccaggcataataagccaaatattatttaattccatttatgtccagaataggcaaaatacgtagagacagaaagtagattatttgttgccaggggttgtggggaggcggagaatgggagtgcctactcatggatacaggtttctttgtggggtgatgaaaatgttctagattaaatagtggtgatggttgcacaccttgtgaatttatgaagaggcactgaaatgtacattttctaagggtgatcttatgatatgtgaattatatcttaataaaaataggtttagaaagaaagaaaaaaataacaacatgcacccaagctggtcaatcctgtaaggcttctgaatgagcaggaagggatagactccaaggtttagagagtctgatgtaggatgtatgttctgccccctgtgcagggttctactgaggatgtggaggaggaatgcctgggggacttgagtattggtggattttggtatctgaggagtcctggaacaaatccccctgcatgcagagggaagaatgcactcagagaaacatcagagcaagttttaggatactcagagaaacatctcaattttaaacaaaaagagagaaaggaagaatgagtatggatactgttacaaacatgttgggaaagacagcttctattctagtctttaagactagagatgaggtcatctttaaggaagagtggaaaagagggtaatgcatggacatttgggggactggagagcattagaaatagatactgtgggggtcagggcaagagccaactgggaagcagggttgagagcaattgagttgatgactgtaaattgatgataacatcattttccctcctatgtgactttctgcaacaaggcttggctttttgggtgtggtcatggagaaatgaaatggttcgcttcatcaaggaccagtttatctagacaagtgaggtgatgagcatagggtccagctcacaggtcctagaactgttaataaaagaaacaaagaaaggagaaggctgtgagtctggagagtggaagagtggtcatagttggagtaattaaaaaaacatgctagacggagaggaggtcaaagagtgggcagtaagctcaaagacccgattttgtagctgatagagttacgaatggtagcaaggtcagtgggagggcgtgggtgtgttagctcagcgagacagagaagggaaggtggagggaggtggacccttagctggagcaacagggcattggatgtgtctcccatgtggatgctgaggtcgtcaggttttcccacttcggagacttgttactttgtcttccagggtgctcttctcccagactggggcatagctcatggatcactccttttcattattcaggatgtggcacaaataaaacattttcagagagtagcttccctgtctctttacttcttgcccccagctacattcattttctctcaaagcacctgattaatttcatccatgttttgtatttggcatacctatttaagtctcttcctccttccgtttcccttctgcttccctttcccctcccatcctctccccttcttcccttcattccttcctttctctcttcctccctccctttcctttcttcctccctcactacttttccttccttccttccttcctttctcccttccttcttcctttcttctttcttcctttcctcctccctccatccattccttccttccttccttccttccttccttccttccttccttccttccttccttccctttattgagcacctttatgtgccaggcacagttgcaagcagtgggaatagagcacaggacagacagactccttgctttcatggagattagagtagtagagggttgctactaaacgaagtaaacatgaaaaagttcttttagatggtgaaaagcgctacaaaggaaataaaacagggtgaggtgaataagagcaagtcagtcctacagtgatgaagaaaacagcatttcaggcagagggaatagccagtgcaaaggccctgaggttagaatgaatttggcgttgggggccaaagaagatgagcgttttggaggagaaagtgccagagagagtggacaaagtgaggatagaggggaaggttggaaaaccacggattttattccaattgcagtgtagagctgttggtgggtgttggcaggagatgtcaaaagtcactcggcagtggtgtgcttttctgtttatgaccatggacctcgtgggaacagggactgtgtctcattcccttgcaagagattctcatggtctgttcgagatcctgacgcattccccattagttggagatgagtgaatgaatgaaaggaggaaagtcggccagagctcaaacagtcgcatctctgcccttagcatgccggtggtgctgctttgatttgggctttgggggacttcctgaccgtttagtttagtttttgcatttgctatgtttgacatgcctctaaatttgatattcttttctcctcatattttatgccaaattttcttaccttgggaactctggcttttttcatctgagaaaaaaaaatgcatgttttgatgctctaaaataaaatttactgagaagtaaagaggtttttttgctcattattcatttgtctattcaattttgcatttttaaaattaatttttattgatttttttcagcattttaaatcagaatcagtctgcatgccagggatccttggagtcagaatgcagtaataagttgtttccaaaggcgactgaagcttgcccggtagaagctgccccagcatttagtgatgcacacaaggattctcaaaaaattctcaaaaaagtgaaatccacttatatagctggccaagagagtcctccatggccttatcatttcttgacctcaaagtgactgcattcaccttgtgagaatagagttactgcatctgttaaataatgcaatcatttttattaattctcaatccatctatgtaggtgaaagtatcatctgaatggccatatggttgactattaaatgaatgcaaaatacctgcatgtcataggagggattctggatgggcgcacaaattagacatcgtgatttcctgttaaataccaaaccccgataaaatcctctcctaggagaccattactatgtggttgtatatttaaaaaaggaaacggttcagagagaaagcgcaaagcagcaatgcatacttaatagcttgttccaaggagtaaattaagcctggaactgtcgaggtattaaacctagcagagcgggtcctgagtattaaagagagaaatttcagagcgagagagttcattcttttccattgactcaatggtaaaataaagtgaactctgacaatatgatttagcaacgactctaaaacataacatgttggaatgactgtgtatcaaaagttatttttctgttctattaccttgaatgaatagcttagatcactgaatctattcactgagctatggctcagtgcatctttgataaggagataaaaagcgctatggattttggtgtaatcttatttatgaccacattgctcgttctgtattcacacatggaatatccatgtttgttaacacacatgctcacatgaatattttacctgtaggccttctattgagctaggatatgttcggtaataaagaattttattgtattttttagatcttaaagaaatagaaatttagaaaatcctttattggaaattcactgaagggagacgtgttatcaaattagtacccatacgctcagctggtgatgcacaatgatgactctatctccagttactcactgctctgtgaaaagggttcagataattcagcccataatctaggaagcactaaatgtctcccattccatggtttcaagcagagttcaaaccaccacatcccttatcttccgagttaaaatagaaagtttcagtgagccctctggatgaagtctcttcttgcaaagtgctgtcatttgggtgcggggagggaaagccagtcttggcttctccacaggctcagtcagctgatggagcccccacctgtcccacgtagcacctcatctgtccccaggatccttcatgctctgcatgaaactgtgactatgaagtctctccatgacgtggtgtggaagcccccagcaggtttctgcctgggtttgggattacacgcctcagctggaacctaagctttgccaacctcattctcatcggagagcagggtgctctcagacccaccttcctctcaccttgctggccgtttctcagactgcttacgactcagtgctttttctcgtgctttgtgctctgtctggaacacgccagcttacctgaaagaatccaaatcttgtcaacttgtctatatcccgctatcttctgagtctacacacatccattcacttaatgagtctttactgatattctccaggtgtgaggctctgtcctaagtgccaggtatagatgatgttctgaaggagaccgatgagatcccagcacaaacagagcttcccccaccaaggggacagtacgcatgctgttttgatcttttcattcacatcatggtgcctgcgaggtggtttccagaaagtaaattcagtaattcattccacaaatatttactgaactcttgccacgtggcttgccttgttctcaccactggcggtcaagtggggacaagaccggtgaggtccctgccctcctggacttacctggatgtgtcagggcaggggagaatgcccagtaaacaaggaagacaacagctaaggcaagtgcggcttgcagctgggccctgaagacaataatcggtgtcatgcttcctggacttcagcgagcttaggagtcatgggggcccaccccagagtttctgattcagcaagtcttgtgtagggcctaagaatctgcatggaacaagctctgaggtgatgctgttgctgctgaactgaacatgctgagatttttcattgagacctgggggaggaagagaaaaaggcagaaagtttcagacagaggtgcagcaggggccaagtccctgaggccagggtcacccagtcaaggaacacaagtggcccaccagcctggggtagaatgagtgaggaggaaggtcatagagagctacagttggaatcaggtgggtccagttcacacagggagcagtaggtcacagtggggagcttggattttcaacagaaagcaattaagaagtgttgggccattttaagagttgagtgacttcacctggtgtatgaatttcctattgattttctaacacattaccaacaacacagtgctttaaaacaatataaatgtattctctttcaactccgaaggtcagaagtcctacaagatcccacagggataaagtcatggtggcagcaggactgaatttctttcagatgctgtaggggaaaatcagtttctgcctttcccagcttctagtggcccctgcactccttggctcatgccctttcctccaccttcaaggccagcaatggtgggccaagtccttctctccctcccttctttctggttccatcttccactattagggatccttgtgggtacattggagcccgttggataatctaggatactctccctattttaaagccagctgatcagcaatctgaattctatctcaacctcaatacctctttgccatgggacctaatatactcacaggttccagggagcaggacgtggacatgtttgcaggggaaattgatctgcctgccaatctgatatgtttaaaatgaacatggcaatactgtccagagagtggcaggaccagggagggactaaggacacccacgtaaggccctgtttgttgaaggtgtgaagcagcctggtttgaactatggtaggggttgtggaagggaagagaccctagtggcttggagagacaactgggggagagctgaggaatacatggagggactgcccactttttagtttgagccacgggactcgtggtgatgcctttaatttgagagggaggaggaagacaagagtcgggagtgaggttgatgttggtttaactgaactgatttaccaattacacactgggctttggaacaacactaattttctttagtttttgaacaagagagtaaagctagggctttaggcgtcttaaggaagctgtcattctgtgggctggcacttactgactttacagggccaaaggaatatacatcaactctagaatgttccataaagaaaagcaagatgtttggagaccatgctaaaagtcagtgtgggtggacttctgcgaggagtacaggctgatctgaggtcctgcgtttgtatcccagctggatatgtgctagttggcttgtccaaaggacttgcttaacttctctgagtctcttttgtcatctgtgaaacgggcctgagaaatccactttgtggggttgtaggaaagattggctatgccgtgtgcaaatactgctcctaagagctcattcctgtagccttgtggtctctgttgagttataatgggttcaaaatcatttgttcttttatgaatgctttaaggcaatgagttttcatgctgctattgtgacccaattaacatggccccatgtaaaggcccttccaagcagccaggaattgtgaagacaaaagtttgtttttgtttttaatttcagcatcattaaaaattatttttattattcacccttctggatgggccagcagacatttagaaaagttgttctaattaagtattggaaaatgtctgtaaaagttaagcagctgtctctgagaggtagaaaacattaaatattaaaacagtatgttatctgatgttttctgaactgaaaacctctcctctcctccatgaacattctccattgtctctgtacattaccatctgggtacacagacaaaatcctgtagaaaaatcaaagtcatattagtatgtttgctttttcaaatcattggcagtacgtaattaattagcaggtctgattttggttttaaattcagttctgcttcctcattagccaagcatgagaggcttcacaacctgaagacatttggaatttgttttcccatttgtattcatgacacctgtgatctgaaatgaccactctaatgtccccctagccttctttgaaacaaattagtggagtcaatggcttctggcctgaggtctcattcaatgagccaaacgtagccaggatgccaagttccagtccagcatggggctttatatactctggacataaagagaccctgacaggccttgttccagcctggcaagaggccaaaacggagcagctgccctgctctcatcctgagatattacatccaggggatggaaacagctgcacaggatcccccacatgggaaggagcgacaagagagggcacagctccacaggggctcaactgcaacacagggcaacttctaagattgtcattattatttattggcaaaaaattccaaacttttactatcactttgattattcctgcagagtataagattattgcatgtggatttttatgtttgaccgctatttaatataggaatgatacaatggatttgggggacttagcgggaagagtgggaggggggtgagggataaaagacaacatatatggtgcggtgtatactgctcgggtgatgggtgcaccaggatctcacaaatcaccactaaagaacttactcatgtaaccaaataccacccataccccaataacttatggaaaaataaaataaaatgaaaaataataataccttaaaagtgaacgacacatatatgatttgtacaaagtagattagagaacatagaaggaatacagaatatagaggtagatacacatatatggcatttacaaattttcaatactactacttatcttctgatgtattatataatttagtcatttatgttaattgtcttttctaccagagtgaaagttcctactagaattttgttctgtttgcttgtttgtgggaaattgtgtttattttctgatgcatctctatgatcccgaggagtttctggcacctggaaggtactaaatcaatctgtattgtgtcactgaatgaattaataaaagtgggtgtccattagtgagcagaggatagagttccagaaggagatgagacacatggatggtatttttgagcagggcatgggatgagatcccccaggagggatggagtagagagagagaaaagaataaaacgcagtggctgagaaggtcggaggaagcccaggtgagcgcggtatcaggggagcccagtaaagaaagcgtaagatcgatccacggggtgaggttcaggctgactgtgagatttattgacgtggagattcattgtgatctttctagagcagctgatactgggctgagggtaggagcatccaactgagagaaggtataagagagaacaggaggaacggaaatgaagacatcaagtacagccacccttccgggatgtgtttccagacagggagaagggaaattggcagcttgaggaggatatgagctcaagctcattaagactagaggaatctcagcatactgtccatggagggggatgattctacagaggggagaaagctgatgatccagaaacaaaggtgacaattgccgaatgacactcttgcattggtgacaggggctggggtccttcctgtatgtgcagacactccaggcttgggaaagagtgtggggtgcccatttatagtgataagagggctatgagagagatgaggagccaggtcaaggtgagagaagggctggtgagaatgtgtaattctctcctgattgcttctgctttttctctgtgaactaggaagtaaggccatgagctgagagcaaagacagggcatggagagttggggattggagggaggaaagtgtgagtgagttatctcggggagtgggtggcagtggtctggagaaatgctgtagggtgtccagggggccatgcccagggctcctgcgagggcactggaactgaacctgcagtgagaccagggaacctgcctgcgtgattttctggagaatggtactgttgtactcagatgataaaggtggtgtgtttttcttggcagtgacaggacctagaggaagaccaggtgtgtgagtgggagctgagatagggagaaggtccaaattattggaaacaaggtaagagaatcatgaagctggggtgtaaacaccatctacataaatgctgggattttgagaatgttggagggacaggtggccagttagtgctgaggcttccaatcccaggagttgatttttgtggggatttggggacctagctgaagaagttggaggcataattgtgcgccctggtattggagattaaaggaggctaaaatgagggttacagagagatgataataatgcaaataacaattgtgctgtgcattcagacacttcttgctctcgctgtgatttaaatgcattggtctggtgtgttcttcatgacaccctgatgaagaaggtacggtcttatgcactttttacaagtgaggacgctgtggcacagagaagttaaataacttgcccaagctcaaacaatcagacgtggaacgagttccccaacccaggtgatcgggttttgagactggtgctctcatgtcctggctgttcctgaagctcacccgcttgacacgactttttcacccctctgacagcagatgccatccaggggctgtggaagtgagtttctgaattggtgtgatgctctcagagcctgggcagcactcaagagcactgtcctccccatgccccagaccgcagtgcgtctctggtgagcagaaggctcagggtgaccctcagcatggccaatggtgtctgacagaacagggtccagcactgtgccgtgaacttggtatccactcagtactacatttcccttcgatatgtattagaaacaaatgcaaacatacagaaaattgacagaatttataaggaatacctttatataccacccagattcttctatgaccattttaaagagtcttgtttttttgttttttttttttgagatagagtctcactctgccacccaggctggagtgcagtggtaagatctctgctcactgccacctctgcctactgagtttaagcatttctcctggcttagcctcctgagtagctgggattacagacgcccgccaccatgcccagctaacttttgtatttttaatagggatggagtttcaccacgttggccaggctggtcttgaactcctgacctcaggtgatccacctgccttggcctcccaaagtgctgggattacaggtgtgagccaccgtgcctggcctaaagagtcttgttttatggcatgttcatccacccatcccccactgtctccaagcatcaatccatcatgttttttatatacatttaaaagtaagttacaggcagtcgtgccccttttcctaaacacttcaacgtgtagatcataaactcacgttcaatatttatttagagtttttttcctttatggtaatgtttgcataagattaaatgcgcaaattgtaggcatatcattttatgaattctgacaaatgcctgcacgtatgtaatggaaagccctgtgacaataccgaccatttccatccccacagaaaattttcccagcctcttccctattacccactctctacccaatcccaagaggcaacccctttctgattatttcttaccatacattatttttccctgttctagaatgcatatcgatgaacccatacactgtgctcttctgtgtaagcttccttgacgtagcatcatgattttgagattcactcatgtgtgcaccatagactggttcatttcaattgctgagtacattattgtatagacataccacagggtgtttatccactctcctgttgactgctatcaggaatttttccccatttttttggctattgcaaagaaagctgctaggaacaattatgtactgtgtaagtcttttgttggcacatgcttttatttttcttgggaaaataactaggagtagaattgttaggtcatggtgtaggtctgtgtttagctttatcagaaacttatatgaactgtgtgtgagagttccagttcctccacatacttaccaacatttaatgttgtcaatcttcttaattttagtcattttgatggggtctggttatttcttattggagttttaatttgccttttcaatatatctaatggcattgtgcttattgaccagccatgtatctttgtttgcaaagtcttttcaaatgtgttggccagctagtaaattctgttgattatcttttcactattgagtttcaagagttctgggctctctattctgtccattggtctacgtgtcactcctatcccagtatcacacggttttgattatcggagcattatcacaagtcttgaggtcaagtgtaagtcctccagcatttttctgttttttcaaatctgcatataaatttcttgcatgaaagtctatttagactttctgcaccttcttgggtcagttttagtaaaaatagtatttttcaagaaatttgtccatctaatctaaattttcaaattttattcatacaaatttaccctaagtatttatttgtcttccacttaaactatgtagaatataagttgagacctgtctttcattcctgatattagaaattctctctctttctctaatcttcctttcctttcctgattattattattttttccttgatcagtttagatagagctatgttaatttggctatgttaaatttccctgtcacttatccattttctgtttcattaatttctatcgctttcctcattattttaattattctgcttactcagctctttatttgatagtttttacaggtggaactttcagtcattgatttggacctttcttcttgtctaatatagacattaaggatacaaatttccctcaagtactcccttagttgataggttgcatttttgttcctatttactttgaaatgctttctaatttcttcttttacccatagattaattaggagtgtgctgtttaatatccaaataattgttttttcctagatatcttactgtgattgatttttaatttaattacactatagtcaggtaatatactctgtataatttcaatacctttaaattaattgatattttctggctcggtgtacagtctatcttgttaaatggatcatgtgcacttggaaagaatgcataagattaaatgcattctgcaattgtcaggcatggtgctctacatatcagttaggtcaaggtagttgctagtgctgttcatactattccatgtctttctttctttctatggttctgcaattccctgagggtgctctgaggctccctggggtgctgcaatgaactcacaggggcatctgggatatttaaactcagtggcctctgttccacactgtgtgaactactactattaagtctttggcagatctttcaaatattgatatattccattctactgtataaaataaccatattcattaataacaccactgatttcatcagaaacattgtgaagtactgggaatctgtaaagttcatggtggaaaatacaagcttttcaaattctaataccagttccaaatacctaagtctaaaaaagccatagtttgtctgtcatttctttttcaaataaggacaatgttccatgaataaagtgctagattagttagcaattctaacaactgcaaaaatacattttcttgacacagacacctttgtttattgtgtagtgaaagtgctttatgagatgttttcatttaattacacagaatattaaaaagatgtgtaatcaaattttgggattgaatgcaattaatatattcaataattaataatttttaccactgtatcgataacatttttaagtgagattggctgttgtgcttttgtgttgctgttcagctgtgggcaagtggtagtggggaatgcagtgactgcttgcagttagttgctggtggcttgatccacactcacggctccggaagttttacccaccatggctgttcctccatcagtgcaaatcacagtacagaaaaaaaaaaaggcaatgaaacgagctttgccttttcagattaccttgaggactctactagggggagaagtctgtggaccagaatgtgagaaccattgaagaaagagattatttcgataatccagtctccagaaatccaacatttctgttatattgaactctgactctgctccaaattactctcagctgattcttacatagtttcaaaaatcatcttaacagagtacaatgcagcaggtgagaagaaatcaaatttgttagaccaatctaagcagagagaagaatctaattattcagtcttcaagtatgcatatattctgtaaatactaggcaattggcagcaagggggaaacgaatttgccacatggtgaagacaagctgggagtttgcacacggcctgagagagcaggtccttatgcctcactagctccagccacccaggtgctcagcagttaagagcaggcggaagagctgcatcaatctgagtctgttagggtaaaattaccctaaatcactccttgatatcaattccccacaagtaggaaaagtccaaatacagaagtccttgctctggagagctacatacagcaaagcagagtggtggagttaagagctctgagctcaagacaaggagctgagattcgaatcctggccttgctggttagaacttctgtcactgtgggtagaatatttcttccctcaaagcctcagcttcctcatttgtaatacagggctgtaagtactcaccttgaacaacatttatgaatgttaaaaatgataaatatgccaaatatccagcataacctctgattcatattaaacactcaagaaatgattgttgttcttgctggttttcatatgagcagagtagtcaggcgccttgacgtggaacccagacagtcagggactggatcaaaacccctttatttatcaagtatgtgacttaacttacctgaaccacacaagtcattggaaaatgaggacaataatacctacggaatgtccttagggttgaagaggcagtgtttgtaaacgcttagaacaggactggcccatagcaagtgtcatgcacatgtgagctattgctgtttgtagtaatgctatcaaaaccttcatcatactgtcattatgatctttatcatcaccatgtagggtgaccaacagtcctggtttgctctaaactctcctggttttagcaccaagtctcggatcctgggaaactcctaagttctggaaaaaaacacaacagagtcgagctctcccttggactatgagtcaacagtctgccagcattggtgttaacggcccactctcataagccagactaggtcattacagtcatcacagagtttatgcgaccaggccagcacccattccaccccccaacacattggaaggtaaagtttcattcctttctcaataatttccagggaactggtcattctaagcaactggaagaaaaacatttctacaacaaagaagcatttgagcgtgaaaaaccttttgagtcccagtttccgctctgccttggaagcaccgtgatttggagggggcccaacagctgtgagtttcactctcacaaaccaatcatttctaaatagagcaataccacaatcttaattttccactcaatggtgaaagcagtcacattattcaaaattattcatcagcacttagtaattcacattctagagcaatctcagagtgctttaatgtatatattacaggcgagatttacagtgggaattacagtatggcaaatcattctttaaaatggtgcttaaatcacacaactttaaaatactaattatgtaaaatatattctgaatttttaatttctacctttgtttaacaatactctcattaccaacttcagaaatgggatagctatatcttcagaaacactcaccctgaatccatccataatagaaataacccagtgtttttacaatgtcgctgtctccccaatgcccccattacaaaaaaaaagcaaataatgatcatctaaaagtcacaatcatctcaagacaatgaagcatgaaatttcgttctgagacaaaatccatctctacgaagagcttgagaatctttgatggtcatgaaataactatttaggttaaaagataaaatttaagaaatatttctgctaatgatgtagcttggaacaaagatacattatcaccatgtggttcctcctgtgtacccatcgacacagaaactgggggaagattttgcagccacatcgatttttttgttgtttttacccatttgaaaaaacttgattgacctcttagaaccgaggaagattggtcactgtttctttgctggagtctggccagaggccatgaagagtggggagatgccccatttacacaccgttggttccagagagccactctcaggatgcattgaagctcagactttgttttaaggtggtttaaagtagctctccctggctagcgatggtggctcatgcctgtaatcccagcactttgggaggttgaggtgggtggatcctctgaggtcaggagttcaagaccagctgggccaacatagcgaaaccctgtctttactaaaaatacaaaaattagctaggcatggtggtgggcacctgtaatcccagctactggagaagctgaggcagggaataagttgaacctgggaagcgggggttgcagtgagctgaggttgcaccattgcactccagcctgggcaacaaagggagactccatctcaaaaaaaaaaacaaaacaaaaacaaaaaactctccccataaccccacaccaggtgtggctctcctgtcctgcacagaagcccacatctgtgggcggtccatctcagtgtaatcttcccaaagtgctgggatgacagtcatgggccatcacacctgacctaacagtgttttagactccctgctgccatatgcttaaaaatgagccaaagcccctgatgtgcctagaacattgttcccttctagttctgaagcaccctttccactaggggaagactggtccacagtggttcttgggtggctggcctggcatttcaagtgtttaggtgtttttatttattcccctcctgcccccagtctaatctctgtgttttaccttaacttcttccctgggacagtctgccattttccagttcaacctttctttcagattgtgatcatatgggagcctttggaaggcaaggtgcaggtaggggtgggtgtgcacaggcacacatgccacagccacagccactgtatccggcgctgcaggtgggaatgctgaccctgttttttccaggagtcgctgattccgattaatcagttagcagctggtacttcctgctgactctaggaagagttccgtacatacgggtttggaatggagaagggggaaggagaagggctaagtggcagaggagaagggagggaagagaaagctacttcaaaaattactgttgtttctcccaggcagaggtcacttcttaaaatctccaatggtactcaattctgcacactgaagattttcctatgatgtgtctacacctggacttgacatcctccctcgtgtggagggcagcactgagagggtccctgatgacccctacctcctggtattcacacctgtgtttaattgccaagccttaagtgtggacagaacccagtgacttgcctctagccaaaaaaatatggcaaaagcaatgagacgccacttctaagatgaggttacagaatgacctgggctttcttcttattcactgtctgttgctctctccagccctctctgcctctttgttttcatctctgcctgtctgtctctcacaaccagctgctatgtcttgaggacattcaggcaatttatggaggtgcccagttggtgagaaactgatgtgagcgatcttggaggtgaatttcctgagacccaccaatagactctgaaatgaccacagacagccccggctgacaacttagctgcattgtcatgaaagaccctgagtcaagacccccagctaaatggtgttcagatgcctagaccacagaagctgagataataaatgtctgttgttttggggccactcaatgtttgggtagtttgttatgcagcaggaggtaactggtgcatcctccagcctgctgctatcttttcatgagcttctctgccagcgtcagttacccaagccatctagccctttctggcttctgcctcacgtttactgtgtatatcaatgtggtcattttgagaatgttacagaaactgaatcatctagtaagtgacctgttgagactggcttttttcccctactcacataatgctcttgagatccatccaaattcttgtgtgtactcataggttgttcctttctatggctgcatagtgttctgtgatataaatgcaccacagtttaattatttgcatcttcaaggacccaggtatcaacaccaagtctagtcgactccattccttaatctgtgctgtgctgtgctgtgttttcaccctcagctgttacactgagtcaggccctcgtggcctctccatgcagcactacagcagggtcctggctggtcagcaactagaggtcccagatgcatggattttaaatgaatattgcagcattttctaggtaaaaaaaaaatgagaaaaaaacacacttgtttataaataaatgatgattattttgaaaaaataaagagagctggctgagcacagtggctcacacctgtaatcccagcactttgagaggccgaggtgggtggatcgtgaggtcaggagttcaagaccgacctggccaagatggtgaaaccccatttctactaaaaatagctgggcatggtggcaggtgcctgtaatcccagctacttgggaggctgaggtagggcagagaattgcttgaaccagggaagcggaggttgcagtgagctgagatcacaccactgcactccagcctaggagacagagcaagactccctctcaaaaaaaagagctaggtaatttaaagttaaatattattacacaatgtcagttgtggcaacatggctccctgacccagccctgagccctcccatcactcatccccacagcagccagagtgacatgcctcaaagtgtccttcctgccatcaaatctccccaaggccagtccgttgtccctcggctgtttcacatggcaaactgaggcctccctgaccgggcctctgcctgctttctcagtgctcggcttcccctctcaccagtctccacactccccatgcaatcctgggcctgctcacacccatgagggcccaggtcctcttctctggacttaagaaccaagccattccctccagcagtgccactgctgcctgcctctcaagggttagtacaggcaccgcctcctctgggaagcctcctctgcttgtccactcttcagagttaagtgctcctcctttagctcttctagaagcctgtgtgccttctatcatagcaacacttatggtttatttatttcaataagttgatgctcagacggcactcagtaattgccaaccaccattatttctactaccatggtgatgatgatgatgatgatgacgatgacagcgatctgttttcttcaaaagccccagatccgctgaaaacaaggactcccttgtcaccaccatgtcctcagtgctccccagtgcccagacagtgcctatggcaagtgccccgtgcatatgtgtagcatgaaaaggtcagcatcctgctgtttggaagtggtcatgaaaacattcattttatcagatgtttagactggaagtttaaggagcctaaagtccatatgagctcaggtgcagattccagaagcagggggacaggaagaaagtggcagcaacagctagctgcccactgtgtgtgccaatgatggagtaggaagctatgcaccacgttctcacagcctctgagtgctgttgctccttgagaagggaaggcccattctactctgtttctttctgcacagaattagatgtgtcagtgaattgctctgaggagtagattagtgtcagttccttgggtcagtgcagaagggcttgtgtaaaagaagaaaggataaatagccagctccccaccctgtctttgggaatgcactttcagaactctcaagtcagaaagcccatttcctggggaaaccaaactcaccacagacagttaatgctcaaccagatttcataaaccctgttgttttcatactctggaggctccagtatttttaagctggagggctcccccatgcatggactgcacgctgagagctgtgcttcacaccaattgctccataagcatcttgtggagaaaatctccatagcttgtgagagacaacctggagccaaacatcaatgcaatcccagtctggatgagataggacatcagtcaatgacgctgagtcacccaaggtcctctggaggctggagcacacaatgggaggctttttgaggttgatatagctggaggacccagctggaggctcccaaatgggacccttgcccccaggaaaaggtgttcttcagagcatggaagccatgagttagcaacaacgtggatcagatggggacagagagagcagagacactgcactgcgtgttttgaaatctcagtgagatagcctaattcaccacattcgattctgcaggaaatcaactcatttgacagaagaacaaagcatgcattgttcaagtataagaggcctgggctgcagggaacctgtcctgacaaggggataatcatcttagctctgagagaatgaacatcacacattttgttccagtgagatatgcacaagcattccaggtatattaaacccgtgacatctaatatggttggatgttattactgtggtgaatttccccaattattgccaaaatctgttcattgtgcctgaggtcggagtggatcatatacttgttccatgaagccttcatttggtgatttaaaagatatgcttctttttaaaaagtgtccgaaatggataaagaaatggtgttctgattgaaactgaatttgattaaattaagatgaatctctgtgtagctccgcaaccctctcagatggccggaatcttattccctcttgaccttacttgtgtgtctcaggttccttggacttggggtagaagctgagttcagcagcccactggcccccatggcacaacttcctcattcactttgttgatgaaatttctggctcctgtgaaatggcgtgggactcttctgttaaaggatatctctgagacatgataccgatcgtgggaatcttctgttaaaggatgtctctgagacatgataccgatcgtgggaatctgctgttaaacgatgtctctgagacatgataccgatcgtgggactcttctgttaaacgatgtctctgagacatgataccgatcgtgggactcttctgttaaacgatgtctctgagacatgataccgatcgtgggactcttctgttaaacgatgtctctgagacatgataccgatcgtgggactcttctgttaaacgatgtctctgagacatgataccgatcgtgggactcttctgttaaacgatgtctctgagacatgataccgatcgtgggactcttctgttaaacgatgtctctgagacatgataccgatcgtgggactcttctgttaaacgatgtctctgagacatgataccgatcgtgggactcttctgttaaacgatgtctctgagacatgataccgatcgtgggaatcttctgttaaacgatgtctctgagacatgataccgatcgtgggactcttctgttaaacgatgtctctgagacatgataccgatcgtgggactcttctgttaaacgatgtctctgagacatgataccgatcgtgggaatcttctgttaaacgatgtctctgagacatgataccgatcgtgggactcttctgttaaacgatgtctctgagacatgataccgatcgtgggactcttctgttaaacgatgtctctgagacatgataccgatcgtgggactcttctgttaaacgatgtctctgagacatgataccgatcgtgggactcttctgttaaacgatgtctctgagacatgataccgatcgtgggaatcttctgttaaacgatgtctctgagacatgataccgatcgtgggaatcttctgttaaacgatgtctctgagacatgataccgatcgtgggactcttctgttaaacgatgtctctgagacatgatactgatcgtgggaatcttctgttaaacgatgtctctgagacatgataccgatcgtgggaatcttctgttaaacgatgtctctgagacatgataccgatcgtgggaatcttctgttaaacgatgtctctgagacatgataccgatcgtgggactcttctgttaaaggatgtctctgagacatgatactgatcatgggactcttctgttaaacgatgtctctgagacatgataccgatcgtgggaatcttctgttaaacgatgtctctgagacatgatactgatcgtgggaatcttctgttaaaggatgtctctgatacatgatactgatcgtgggaatcttctgttaaaggatgtctctgagacatgatactgatcgtgggaatcttctgttaaacaatgtctctgagacatgatactgattggcttttttcttctagtttggtattattgcagtgaacaaaatagaccaaaaataggtgcatgagagagatgggtgtgggtagaatacaccatgtacatgtgtgcatatatgtaatatgtatacatatgtatactctatacatatctgcagtagagaggctgcagtcgtaacatcacagtggctgtgtgtttactctgtgccaggctttgtttcagagctctacacgcatgaattctattatcctcattagcaacctctgagggagggacacctatcatttccctttactggagaagaaactgaaaaagagttttattaacttgcctaatgtcttgtagccagtaagtggtgacatgtgtatgtgtgctcatgcgtgcgtgcgcatgtgaactatggagtgaaacacagcatacatgcacaaaggcacatggagcttaagtgcacagctcagcgaattttcactctgaacacagccatggaaccacctcaaatcaagaaaaaacttaccccagaatgaccccttgagtcccaggctttacctcctgctcagaggaaccctctgtatgagtctgttcggggtcctcaataaaatatcacaggctgagcaagttaaaccacagaagtttatttctcacagttctggaggctggaaggtcactatcaaggtgccaggggagtgaattctggtgaaggccttcttcctgtcttgaagatggccatctcctctctgcatccacacatggcaggaaaaaaagagagagagaatgggcactctctgatcttttcttataaggatgctaatcccatcacaaggacctcaccttcatggccttatctaaacctatttacctcccaacagccccatctccaaacaccatccaccttgggagcgaggactttgacgcatgaatttggagggtacactactcagcccatagcaccctcttttgttttacttctaaaccatagatcagctctgcctgtttgtaaatgtgcataaataaaatccacacctagtaaagcaaacatggttttgtgtctgccttcttttgctcaacatcgctgtgagagtccagcaggttattgcacagggaaattgagcatttgcagtactctctagtactggtgtgtgatggaccttggggttgttttcagtctggggctctttcacacagtgctgctgagacgcactttttctataggttttggtaaatgcagccctgcatttccactgggaatatacccaggtgtggactcacttggttactgggtatgtgtaggtccctttcgaaaataccgctagttttccacagggctgttccaatttcctttcagcccacagtgtatgagtttccatagatccacaccctcggcaatacttggaattgtcagtctttttcacttcagctcatcagatgggtgtatggtggtattgcgtggttacagtttgcattttctggaggtaaaatgaagggaaactccctcccgtgtttactggccatttgaaaatccagaaggcactgagtcaagccttcctgttgcattgtccgccttttgcgttgtatcagtccgtgtttgtttaccattggtgctcttggtgttccatttagaaaatcatcgatgatctcaatgtcaggaagacattctcttatattttcctctatgagttttgtgatttttccctttcacagttagatctacagtagactggaatggagttttgcatatcatctgagggaagagtgcaggtccagtttttgcccacatagaaattctattgacctagcacattaatttagaagaaggaccaaccccattgtaccacaggattacttttgccatgaatcaagtggtttccgtgtgtatctgtttctggacatgagccatatttttcaccaccaccaaatgggcctaagtgttgcagagagagggttagtgctctgacagcatcatggagagggaggccacttccctgtcttcctcctgccagtctccaggtctcagctgaaatgctccctcctctaggaagcctgtgatttggggcaccctgtgcagtgggtggtcctgcctttaagcttcttatttatagttgtagagttctatgtagcctggaagagttaagctgcaaccagggtatttaatggctgtacctacgcttatcaagggctttctatcatctattttaactgttatatattcttcccttcgcgatggtttgaaaacaggatttgggtaagttactccagatggtgactctggagcccacgtagacaaatgtaaggttcatcatcttttgcaaaatgccaagttttctgattttttctgcaatagtctagttacctacttttttgtaaacatacatgcacacaaacatgcacatacacagaatacacacataaacatgaacacacatatttgaaggcacatgcccacacaagcacacatgcacacacacaatcttctctaatatttgcactgttaaatatttagaagtataatcccttcttagaatattcagcagattattcacactaaaaaccccgcagctttttaaaagatgtatttcacttttttcctgtgtgtcagacagaattaatcaaggctctaatgattgttctgcaggtgttatttcaaaaacaaccaatactccccaaatcattaaatttacagggagacttttgattacagaagctgatgactattatttctaaaatagaagagatgcagagtgacaaaaatcaatgacatggccgttaggttacagctaaatttattcaagttttacattgctgaggtctcacaccactttctctgcaaatactcactttatagtgactctccagtatagatacctagatatttataattgttattctgatgatttggtatttatttatttttttgcttttctttattttgttttatttaattatttttatttcaatggctttacaggaacaagtggttttttgttacagagatgaaccttgtattggtgaagtctgggattttagtgcacctgtcactcaagtagtgtacatcatacccaacaggcaggattttttatttttgtttctgtttttgtttttttgagatggagtcttgctctgttgcccaggctgaagtacagtggcacgattttggctcactgaaacctccacctcccgggttcaagcaattctcctgcctcagcctcccgagtagctgggattacaggaacgcaccaccacacccggctaatttttgtatttttagtagagatggggtttcaccatgttggtcaggctgttctcaaactcctgacctcatgatctgcccgcctcagcctcccaaagtgctgggattacaggcgtgggccactctgcccggccaacaggcagtttttaatccctcactcgccctccccctttctgattctcaagtgtgcattataccactctgtatgcctttgcgtactcatagcttagttcccacttataagtgagaacatgtggtttttggtttttgatccctgagttacttcacttaaaataacagcctccagttctatccaaattgctgcacattattttgttcctttttatggctgagcagtattccatggtgtgtgtataacattttctttatccattcatcagttgatgaacagttcagttggttccatatctttgcaattgtgaattgtgctgcgataaacattcacacactggtgtctttttgatatagtgacttttcctttgagtagatacctggtagtgggattgctggatccaatttctgagcattggccatagtaaaggcctggctgtgtggcagtgagggtagtttgatataagcacccagggattccatctgtgttgaggcccagtgatgggacagtccatgagtgtagaacatcttctaatgacactaataggtgaatagggatttctgttgggagagctgctcagttgtcaacttcgaggagacgtagttcttctggtttcaggtctgtcgtaggggctacataagaatcgaagcctaggtcttcataatctgtatattcatagcttcagtatcattggtggccagttgttttgacagtgagagaggggttgttaatttcatctgttatgtacaggatacgtagggttgggagggcaattaacattaggattatagtgggcaagagagtccacacagtttctgcttcttagggatctatagtgctagtatatattaatgttgttgtcaatatgagggaaacaatatatcaatatgagggaaataaaccttctttgagttcttcatgacatctccatactgttttccatagagactgtactaacattaccgcccacagtgtctaagccttccctttttaccgctttcgtgagaatatctattgtttattgactttttaataatggctattctggctagggaaagttggtatctcactgtggctttaatttgcatttccctgatgattagtgatgtcaagcattttttcatgtttgttggccatttgtatatcttcttttaagaaatgtctatttatgttatttgtccactttttaatggggttgtttatctttttcttgctgatttgtttgagttccttgtatattctggatattagtcctttgttggatgaataatttgcaaatatttttttctcactctgtaggttatctctttactctgatgactctttcttttgctgtaaagaagctttttagtttatttaggtcccatttatgtatttttgtttttgtggcatttgcttttggggtcttagtcataaattctttgcctaggccaatgtttagaataatttttcctaggttttcttctagaatttttatggtttcagatcttatatttaagtctttaattctccttgagttaatttttgtatatggtgagagatagggatccagtttcattcttctacatgtgactatccaatattcatagcatcatttattaaatagggtgtcctttcccccaatttatatttttgtatgctttgtcaaagatccgttggttgtaattatttggctttatttctgggttctctattctgttccattggtctatgtatctacttttataccagtactatgctgttttggttatgatagccttttagtacagtttgaagtcagttaatgtgatgcttccagatttgttctttttgtttaggattgccttggctattcaggctctttcttggttccgtatgaattttaggattgttttttctaattctgtggaaaatgatgtttgtgtttcgataggcgttgcaatgaatctgtaaatttctctgggcactatggtcatgttcacaatattgattctttcaatccataagtatgggatgtatttccatttgtttgtgtcatctatgatttctttcagccatattttgtattctcctggtagaaatcttttattaataactccttggttaagtatattcttagatattttattttatttatgtagttatttttaaagggattgagcccttgatttgtttctcagtttggacattgttggtgtatagcagtgctactaatttgtgtacattgattttgtaacctgagactttgctgaattcatttatcagatttgtaagtcttttggagtagtcttcagggcttatattggcaaagagagacagtttgacttcctcttttccaacttggatgccctttactttttttttttctcttgcctgattgctctggctaaaactaccagtaaaatgttgaatgggagtggtgaaactgggcatccttgtctggttccagttcttaggaggaatgctttcaacttttgtccattccgtatgatgttagttgtggatctgtcatatatggcttttattatttagaggtatgttccacctatgcctagtttgttgagggtttttatcataaagggatgctggactgaattgaatgctttttctgcctctattgaaattatcacatagtttagttttcattctgtttttgtgatgaatcacattcattgactttcatatgttgaaccattcctgcatccctgggataaaatccacttgattatggtgaaatagtttttttcatatgctgttggatttggtttgctaatattttgttcaggatttttccatctatattcatcagggaatattggtctgtagttttctttttttcttttgttatgtcctttctggctttggtatcagagtgatactggcttggtaggatgatttacagaggattccctcctcaactttttggaataggttcagtagaattggtatcaattatctgaatgcctgctagaaattggctgtgaatccatctggccttggacttttttgttggtagtttttattattattattattgttattactgattcaatctcactgcttgttattggtctattcaggatttctatttctttttctctgattcaagctaaaggcatggtatatttccagaaatttatccatttcatctagattttctagtttgtgtacatagctgtgttcataaaagtcttgaacgatttttagtatttctggggtgtcagttgtaatgttgccattttaacttctagttaagcttatttgaatcttctttctccttttcttagttaatctaggtagtggtctatcaattttgtttatcttttcaaaaaccaactttttgtttcattgatcttttgcgttgatttcggtttcaatttcatttagttctgctctgatttttatcatttcttctgctagctttgggtttgatttattcttgtttctctacttccttgaggtgtgatcttggtttgtgaatctgtgagttttcagacttttggatgcagatgtttagcactataaactttcctcttagccctgtttttgttgtatcccagaggttttgatatcttgtgtcactgttttaatttcaaaaaaaattttaacttctgtcttgatttcattcttaacccaaaaatcatttgggagcatattgctcgatttccatgtatttctacagtttagagggttcctagaattcatttctagttttattcctctgtggcctgggaagatatttgatatgatttcactttttaaaaatgtattgagacttgttttgtggcctattatatggtctatgttgaagaattttccatgtgttgatgagaagaatgttctgtatacacctgttaggtccatttgttctagagtgcagtttaagttcagtgtttctttgttgactttctgcctcaatgatctgtgtagtgctgtcagtggattgttgaagccccccaccattgttgtgttgctgtctatctcttttcttatgtctggtagtaattgttttatgagtttgggagctccagagttagcagcatttgtatcttcttgttggattgatccttttgtcattatataatgaccttctttttcttttttcacagttactgctttaaagtctgctttatctgatataagaatagctactctttttcacttttgatttccatttgcatgaaatgtcttattccacccctttaccttgaggctgtaagaatccttacatgttaggtctgcctcctgaagacaatagatatttggtgtgtggttttttttatccattccaccagtctgtatcttttaagtagagcatttagatcatttgaattcaacgttaatattgagatgtgaggaactattttagtcacagtgttgattgttacctagtgactttgttttcttcattgtcttatagttttataagccttgtgaattttatgctttcagaagtttctactctgctgcatatcaacattttgttacaaaatgtagtactcctttcagcattttttataggtttggtctagtattgacaaaaattcctcagcatttgcttgttagagaaagactatttctccttcatttatgaaacatagttttgctggatacaaaattcttgaatgacagttcttctgtttaaggagattaaagataggacccccatcccttatggcttgtaaggtttctgatgagaagtcttctgttagtctggtaggttttcctttataggtgacctaacgcttttttctcactgctcttagaattcttccgttcatgttgactttagatggcttgatgactacatgcttgggtgatattctatttgcaataaatctctcaggagttctttgaactactagtatgtgaatgtctaaatctctagcaaggctagggaagttttcctcaattattcactcaaaatatgttttccaaactttttgttttttcttcttcataaaaacctgtgactcttaattttggccattttacacaatcccacatttctttctttctttctttctttctttttttttttttgagacagagtctcgctctttcgccaggtggagcacagtggcacgatctcggctcactccaacctccgtctcctgggttcaagcgattctcctggcttagcctccgtagcagctgattctacaggcatgtgccaccacacccaggtaatttttgtattttagtagagacgaggtttcataatgtaggccagggtggtctcaatctcttgactttgtgatctgcccacctcagcatcccaaagtgctaggattaaaagcgtgagccaccgtgcccatccacaatcccacatttcttggagactttgctcatttcttttcattctttttaaattttgtctgattaggttaatttgaaaaccttgtcttccagctcaaaacttctttcctctactttgtctagtctgttgttaaaactttccactgcatttcgtagttccctaaatctgtctttcatttctggaaattctgattggtttctctttaaaatatctatctcagaaaaattttcatgtataacctgaattattttaaacaatttatttatattggttttcacttttctcttgtatctccttgagtaacttaataagcaacattttgaattctttatgtggtatttctcagatttcatcttgtttggatccactgctggagaattagtgtgatcttttgtgggcgttatagaacgctgttttttttttttttttttttttttttttttgccagaattatttttctcactccttctcatttgggtagattatttcttctaattattttgaatatttattttttatttgactgggttttcaaaaattaatttcttatttttccccttggggatgtgactttaatgtttaccgtttattgtcacttagctttggatctgggtgttttcagtgatgaaggctctgtaagagttccttggttatagagaatctttgtgcaattgcttcctcagatgctggttgtagtagcaatgtgctgggtatgtgaggaggttcactgcctcctatgggctggaatggaagacgtttcatgaagcatatcttgttccccagtggtatgtacttaaaatttttttttgccccagtgttttaatcactgggttgaacaattcagactttaggtcagtgataggtgtccatgggtaaaacctggctgtggctaaagaaggtggataaatgcagtagcccaatggtgggcagacctcctagccttgacaaagcagctgtgtaacctcttagtaaaatgtaccagggtgttttcagggggaagggagggtgccaccatagctccttccaggccagcagaaaagtaatccatgtcccagtcactcctgatccagagttccagctattcagatcaaacaagcacctcttttcatctgcaggaatgctgatgttccatgtagagagggattatgactccacctctcatagaagcctgaacctggagggcactccttctgtgaagacacagtcaccctgaagcttttcagaaaggctgtctatgaacacacccgtatggaggtctcatgagagaagccccagctgtgtctgtagtggtgggcaaaagggagaagaagcccccttatccaagacccttcatgagcaccagggctgcctgactgttgtagagctgcagactttccccactgagctcagcactgcacctgtgcctctgctgaaagaaacttcccacaggcaggaagttcagggacccaaggcctgcagtctggttacttttgtcccagggagtgctcccttattgtccttcactccctctacccctggaagtagcagtccctgagggccataccactgtgaaccctgctgtccctgggtctagccacccagttgggccgccaccctccaggctggtgctggaaatgtctcccagggatccagtgatgagaactgttctctagtctcccagcagtggggaccagcaccagttctaatggagtgggaggggtgtggcatcgactttgtgagactttcttggttataaatagacttagtgtgttagctttctcaaatgccagctgtagtcctaatgtactgggcacttagacagactccagatctcccagttagccagggtaatgcagatgacggcgatagctgaggttgtgcaaaagatttctcctttctgagcactgtgttattttttcgcctggttcacactgtaggctgctgcccattgcttctgtcaaagggtgggtggtttctttcaggttttctgttaagttcttgtgttggttctgaaagttctagtatttttcctgtagctttagacatccaacctgatattaccaagatgactgggagtttgtggctaatgcctacagaagaagagatgcatcccttcccagacatcttatctgttgccctgggtaatgaagacattcaatttttaattttttaaaattattattattttttgagatggagtcttgctctgtcgcctatactagagtacagtgccgcagttttggctcactctaacctccgtcccctgggttcaactgattctcctgcctcagcctcccaagtagctgggaccacaggtgtgtgctaccatgcctggctaatttttataatttttagtagagatggggtttcaccatgttggccagactggtgtcaaactcctgacctctagtgatctgcccgccttggcctcccaaaatgctgggattacaggcatgagccactgtatctgacttcaattttttattttttcaaatatttttatttttaattattaaggatacataatatgcacattaccctgataatttctgaaatattttgtaaggattaatatacaaaaatttattcaacaatatttattggggtgctaagaaatgctaggacccaggttagacctgggctatatgaagatgaaccaggcagacctattcttgccttcatgaactttttattttccagaagagatggacattaaactcataaccatttgcaggcatgattcataaaaaatgcacttgagtacttctgtatggtcatcttatgggaagaagccccagggaagagtttgttaagctgaattcttgaaagcatggaggactccctaggacattggttctagatatagaaaaataatgtttcctttttatagctctctttacccaaaatcatgtttcttcacttcaacattcagtaagttgtggaaagctcaaattttgagttaaaatttgcaccatcataagctcaaaacagctgtatcaaggagcataagcagggaccattttgcagaaaaccctggaggtttgttcctacttacatctcctttgtctcccgcagtggggtaggatttttgcatacattttcctcccctctgtcaggggacttaggcaatgtctggaaacatttttgattgtcacaattggaggtgaaagcatctaatgaatagagaccaggaatgcggctaaaaatcatacaattcccaggatagtaaccccaccctccagctccccacagagaaccaccaggccagaagtgtcagtaactctgcctcctctggtgtccttctctggactgcaggctcctcgatgtcagcacagggcggcagctgaccctgctgtgcacacatgtgctctgtcctggatgtcgcgacggggtgagtccttgtcctaccagctaccaggtccgcagctgggaggtctcttaagttccttaagctttagttttctcctctcgaaaacagcaatgccttcctcacatactcatttaaagcccttatcaaccctggatgaagttcacagcttctaaaatttatatcctaatttatgttatttttccttttaaaagttcaaacaaaaggaatacatccccaaattacagcttaagtgacgatgtagaaggagagcttattggccgttgaaatggccctggcactgaacaatggtacaggttagattatcaagtcttcactgtctccagcctgagaccggggccatgcctccatcctatagctacatctttcacttctatggcctgcatcccacttctttgtttttttttttttttttagacggagtctcactctgtcaccaggctggattgcagtggcgcaatcttccgcctcctgggttcaagtgattctcctgcctcagcctcccaagtagctgggactgcaggcacatgccaccacacccagctaatgtgtgtatttttagtagagacggggtttcaccacattggccaggctggtctcaatctcttgacctcatgatatgcccgcctcggcctcccaaagtgctgggattacaggcgtgagccactgctcccggccgcatcccactttttaatgcatggcaaattggcctgtgatttagattgttttcacttgctttaccatgagccagcactaagatggtaccattgttaatgacagggtgcccttctgctctgccctattcttagattccagagagctgtggcccccaacccaggcacaacagcaacctcttcctccaagcctgagctatggagagagaagttccaagggtgctcgtgacagaacccctgtcttcccctgatgccatatgtcatgtgtggtcatgtcaaggccctggcactcaacaatgaccctccaggatgttccagaatatatgcctgatcacctgccccatcttcagctctccctgggcttggccttgtacttatgaaccaggtgaacctcgttcctacctttgcagtgtgtagagtccagtgggggcttttttttttttttgagacggagtcttggctctgtcgctaggctggagtgcagtgagtgcagtggcgcgatctcggctcactgcaacctccgacttcctggttcaagtgattctcctgcctcagcatcccgagtagctggaatgacaggcacatgccaccatgcccagctaatttttgtatttttagtagagttggggtttcactatgttggtcaggatggtctgaatctcctgaacttgtgatctgcccaccttggcctcctaaagtgctgggattacaggtgtgagccaccgcacctggccgagggtttttttttttttcaacacagtgttgcccaggctggtctcaaactcctgggctcaagcaatcctcctttcttggccttccaaagtgctgggattacaggtataagccaaagtgcctggccaaagggcattaatttaaaaatacacccataacagtgaaattaaactgagaaaagagctgcagagaagaagaaagggcaggtgctaccactgcaaataagtcagggtctggtgcagccaggaggccactgaaagctcagctgaggctgtgacagtgaagacgagcctgccacgaaggatgagggacttctccaggagctgtggagagtggggtgggagaggccaaagcctgcaggctgggggtggaagaagatgactctgtgctggagggtaggcctaggaggagagtgcaatgacaggaaatcgtgcatttcactctaagcatcccaagtgaggcagggccaaaaaggctgggaggtgggaccttatctctccttcctaacttaactccctaattgccagcagtagagatcccccacccatgataggagtaagaaagttttccccatcacagcagcactctctgcagaacctcctgccaactatgttgcattactcatccctctcacccccaccacccaggatatcctggcagcatctcagatctcacaagcaaagagagacagggaagtttctgcaggagaaggacatagtcaggtacatgaatggaaaacctcttggctcctgccgggacagtggattggagtaggcaggggaccagtttgaattctgttgggaagggaatgatggtggcagtggcaaggggaggggtggatgcattcctgtgacacctcagagctaggatgcaaaggtcttggagttgtagtctgggggctgaatgagaaggagctggcagatgtgactcctgtgcttctggctattcacttgcatggacagtggctactcatgtgcagaagtgtttgctgagaaaatcccctagaatggagccatgttagggcaagtgatggtggtgttgtgtggacatgtgcccttgtctcatcctgaacacctgtttcctaaatgtggcccatgctccccagcgtagacctccacttgcaacactccactcgccctctccctcttctcttggccatccccatgtcccaaatctttactcttcttttagtgtttggctaagttgatttgccctccaaaaatgcatcttcagcatccttagccaggcagagagtcagaatttcacttatttaaacagaacctgagagtttgaaaggaactcaaagtcaccagttgccataagcagtggcagtgtttcaatcctgtcagtgacaaggagccttagtggagtttttttgttagtttttttgttttttgtttttttacaacattgaggtaattatttaatgacacaggaaaataacatgttatgaaacaagctggttacaagtagtaggtgatgacttcattttttataaaaaaattaaaaagcacgaacatgcatataaaaattagattatgtacaaaataccaatagtatttacttctgctcagtaattaaatattcttctctttgtttttgtcttttaaaaaacataatttctgaaaaaaatcagaaaaacatgatcctggagagagttattaaacaccaggaattagggacccaagaagctaagccaggagctcagcagtcaaggttggaagcccaggacaggtccgaccagagtgatggtggccaaacccagaaatggaagattgttcttttcttttcctactggaatgttctttaccaaacagttttctctacaatagatactagagcacttatttaatgggatcctatgattaactggcaaaacagcaaaatgatgctagcaactttggctttgaactgctacaaaatgtactatcttgtagttatatactatacaaaacacactagaaatcaagtgctcctacaaaaaaaaactcatctgactaaatcactgactttgctgttttttttttctaactttttcattttcaatcttcacagcaaatgtattttttgtttcagggcctggaagaggtattttttcctcagaaagaagctaacattaatgtgtgttgggcactgtctgatgccttggctctaactccaagtaagctgccctggtcttctaagtactctacagagtgcaaaggcttaccaaatccaaaccaccttgaattaaacaaatcttaatgaggagcatcatcattctttgtatgtgcgtttttaaagtctttcatagtgtcccctttcccgtggggtacctcaagtcttctctgccaactgctctcacacctctcttccatagctctgaatgccagaaacatctgtccatcaggctgccgtagctggcagctgggtggtctgccctggatgattggggtaaaatgcaacttccaagtgatgtgtttccttttaggatgtaatacatgaggagttggtttctgtgtggcaggacccacctttccctgtccagtgttgatgactagtcttcaccagagttgtccatcagctcctgagcacaaaacattccctttgtgtctagtgtttgcttctgggctgtcctttgcccactgctcctaagacaggaggataaccatgcactggttcctctagagatgtaaatcctctaggcccacaggggtcacctgagacatctgtctcatgactggtgatgattgttgcactatcttcacccttcaataccacctggagaacagggatcttgttgtagtgaagcacctagcacagttgctggcacagaggaggccctcaatcaatgtgtgctgagcccatgtcttatgaggaaggagattccaggagacagaaggaagcagtcgagcatcccctggtgccttcactgctgttggacagtggacgctcggaggatgccctcctggatctcctgagtaattcaaacttctgacttctcacattttaaatagtgtttcagtttccaatcctgattggaaaggaagggagggtgggggagagggaggccaggggagggcagtgagcccagtgcagtgatgaagaacacaccccccacagcagggctgccggggtctggtcacggctctgccactcaccgggttgtttaacctctctgtgccttggtttctacatctgaaaatgcaaataataacccccatttcctaagctgtcaggagcatgccctgagttaatatatgtgaggacttaaaatagtgcccattgatgtgttagctgtcattatgctataagcacttgttgaaaaaaataaaagatcttagaattttcaaaaatgcatcaaggtgagtcttctgaaaaaacatcagagctctttgttggatgttttataccttacagtttattagagggatttaatttgaattataaatcaggtagggacaccatcgtcttctctgtccttagagcctctgaaaaccctaatgtaatgttgatggggaagacggggaaaggaagagtccttgacagagagcatggcggggagtggcgacagggtgtgggaagacacaggtgggaagacttctcctgagagagaagcagctcttgctttcacccctccttccctcctgctcctcactacatccccaggattagctcagcatggctgaaaggaggtatccagggtccattccttgcaggcacacctcaccgacacaatgagcttttacccaggagacctggtgctgatggtcacctgcccaccagagcacggctcttgaactcagctacttccgtttatcttgagtgctccttgctactggattctgtttgcatctaattccacttattactttgctaacaaacctagctatcatctgggtataatttcaagagtaggaaaacccttggctggagaaggtcgtgtagtgccagctctgtttccaccacttatctgtgccatgaatccattctgtcaggcatgttgatgcctcccatcttatttgggcactgaggatgaagtgacatgcaaggcagatccagtctctgctctcctgtgggcaaataagccaagtgcaaccgtcaagcaaagaaatcgaacccttgagatttttggtaagagtcatgagcttgcaatcaggcccagagatggagagctatgatatttgggtgtgtttcttggcatcacctagactcggttttctcaccctaagatgggtgtacctttgcctacgtgatagtgttgtcatgaaaagaaacatttcatacaatatttggtgcacggtctagcagggagtaaatgctcagtaagagtatgattctctctccaagagaaggacttcctttttttaattttatttttattttttatttttttactgtataaagcataaagaaccctgcaattgcgatgcttaatcatttatactctagggctaaggaagggaaggatttgtccctctgttttttttattactatttttcctatggcctttctgctttgctaaacagttagatttcaggggattatttgcatgtcagagagggactttcaagagtgaacattctattgctgtgtaaaaaaaatcactgtaggacttggttattttaaagaacctacatttagtatctgtcaattactgtgggtcaaaaatttgggagtggctcagctggtgattcaggctcagggcctcttgggagactgcaggcaggatgtcagctggggctgtagccctctggaggctcgatgccaccatgagtccctcccatggctgtaggcttggggcctcagctcctcagcatggtaaacttctccatagagctgcttgagtgtctttacaatatggtggctggcaacttgcccaagagagaacagggaggggagagggagagatacaagagatggagtagccacaatgccccttatgttctaatcttggacatcacacgtgtcacttttactgcattctatttgttagaagcaaagcactaagtatatctcatacttgaggtgggaggaattagcctccaacttttaaagtgagaattatccaagaacttgtggacatcataaagagaacaaaagatccagacatggagggccttcctagtatatttgtgtcttggtcttctgtcttctctagactctgagctctcatgtaaataaaaaaataaaccttctcatcttttcagttgtgaattatgaaaattaatcctccccatcctcttcagtctgcctggtggagctgaactgtgaactttccctttactgaccatttacactgtgagaccattccatccatcagtcagtgtggatgcacactcctcacctacgtggagcttagtcgctgaaatttagacagctgtgtccagggacttcagctctgacattaaggtgtgtgttttagcctcgccagaggggagcaagaggatttctccatcaaacaaagaggtcagctctgcaaagcatctatgaaaccaaagtcaagcttgctattttgctggtctgtttagccaaggcctgtatgttctctcagttcccaccagaaaacactgtttctgggaaatttcaccatggattctgttgactgctgcagttttgctgccttggtaatgtcctgaaggaatacattcttcaccagagatccacaaaaagagtttagatgctttctgaaattttatgcaaggtcggtggccataacatgcggtttttggggagagagtctgtatttttttcagactctccctcaaggtattcaatgacagtccctctgcctcccactgaagcacagatatgtcaacaaaaatattaaaacccacaagctttactccctagagcaaagggtgtggttttcttctgatgcttgtgactctggtatacctggtgagtggaaggacagatgctttgactgtgtgatggtggctgcatctgccctcccctccccctgcaattaaactgtgaacatcaagatgcaaagggctatgccaccctcttccatcagtgatcaggcctttccttacaaatggttgttgaattgagcttttgcatgcttgctagagcttggttaaggagtcgtttctgggtaatagttcctgttgctatgtgcaggtcttgcccagaagagaactgagtttcagctaaatggccgtcagtttgtcatgtgcaaaataagcaaggtaagtccacaggcaggtccaaacagaattgcagaaataaatgcaatgccactgagcctgcccttttttgactccctagagcccttgccttcttcctctctccctcccttagcaaagctttaacccagattcaccgcctggccatcactgtgctgaaggccaggaaattgagatgaatgggatgcacttgctaccttggagctccatgtctagaaaggctggcgtttaataatcaaacacactcagaacccactgacatcacggatcaggaacaagacccctcccaacccacccctacagtctgttctcaacacagcagcctgagtggtactttacaacatggatgagattcaccagcttcctcctctgctccaaaatcctttgccacctgcccgttacactccgagtagaatcccattctcacggcggcttgcaggaccccatgtgatctcctaaccccctatatctcccctccacactcttccctcctgccgctctcacccctgcacagcctcactcctctccagccacgcgtgccttcatccaattctggaagcaaacatcattgcggggcttcttcttaccacagggcctttgcacttgctgttgtctcttcctggaatgcttttctcagaaggtcccgtgggtggtttctcctagttgttctggtcttgcttcaatagtcgcctctcatggaatctttccttgtttactcttttccgaatggccctctcgccctattactctacatccgtcgaccttcaccatgtcctttttgcaggtgtacaaactttttgcctttgcacgtgtctgtcactagaaggccatgcagtggggaggggccagctcaactctgggatcctcagtgcccaccacaccgtggcactgagctagcaccagctagtatttgttggataaacaaagcccaggtatttttgattccaaaccctgtgttcttcccactacccagcccgccctgccaggatcttaccacacctgctattcatccccataagagaggagcctcacctttgtataggtctaatttccatatataatggcattgcactgataatatcagcgaccagaacagtagtaggtgctcagtacacatgtgtaatttgaataaatgaatgagtaaaggaatgaattaattaatgaatgaacaaatggagttttaaccagaggtggtaactctggctaggagggtcgggggcctttccaaaggaggcagatgtgagctttttctgaggacaactggaatcagcccagggaggcagggcagggcataggtgggcaagagtgtcccctcctccgtgttccctggccccttccatgccccggtctcctgcttcctctccactctgcgcttgaataggttcaggtgtcccctagcttgaaaaacacccaattcacctgccccagctgtgccttttagctagcgtctcctttcttttcctttcatgccaaccttctcaaataagagttccctatttctttccccctttcttctccacctgctccctcctgaaacttttatagcatttctcatgcggagctattattcgtctttggaaatggaactctattgagtaaagaggcgcaagacagcttgggatcaagaagttctgtgaaaaaaggagagtgatttttgaagacagtacaccagtggtggaggatgagacggaggggaagaatgccacgccccttcaggaaggtggaaatgggctctgtgagcgctgggaggcagccacatccccattcctgagagatcatgccattcttagtgtgctgtgatcatgggcacctcagcgttaggacctgtgagaaaaataaaataaattgtgtatatattagtgtatctatggatgcatacacacatatatgcatgtataaacatgcaaacaaaacataaatgtgtgcatcaaactagtggctcagtgttgtagattttggctactattgcttcatttagagctgtgtgcacaattagacccagaaattctgcttctagttatttatcttaaggagatgctcacatatgtatgcaaagatgcatatttcacaatattcattacaacgtggtctgtaatagccttctgaatgtccacagataggagacagggtaaataaattcaggtagaatgaggtgactgcatataaataaacaagcaccatgaatcaagataaatctacacttgccgatgtgggaagatcaccaagactcgttgctttgtgaaaaatgtaaggggctttgtattttgaaaaagatgctaggggtatgcgtatatgtatatgtgtaagtgcacgtccttttgttatttaaattctcactgtgtttcattttcatgataatgtaagaatgtccggtttcattcaataatttaaaattgcttctttaatggcaaagatagtggagatggctgtgtctaaggctcagactctcaggggtttaaactgacgcatctgatgttggtatgttttgcaagcaggaggtgcacaggctttggaagtgaagtgaaatgaactctttcctgtctggggcagcggatctcctttgagaccccttcatgacgcatcccagcctttgagtctgacagtcatttggcacctccatgcaagtgattctttcagaccaggtgacaacatgccccattgtctcccaatgcttctatctgctgggtatttagtcaatatgtgtttttcagcacttaccagtaacgaagcactgggctaggaatatcaggtgagcaaaattagatgtggctctgccctcctggagaccacagtccagagggaaagacggaatttcatcaaaggacctcgcaaatcaaatgtcaattgacaagtgtgggaattgctgcaaacaggaaggcccagggcactatggagatgtgtcatggggctgcctgcatggttgtgcagtccattcattgactaggggctccccgtgtttgtggggtgcagtgagagggacctgcaatctagtccacacttcactgaccaaactgcactcgagtggagaactgtgtctgcctggcagggggcactcccttcccctccctaggctgcaatccctcagcactgtgctggcccagggcaatgccctaattctccacacagacagggagccacagattaattctcgaaggattgcctgtagtttggatgtgtccttggctatggccttacagggatatcagagagggcttcctggaggaagcaacacatgaattctgaggggtgtcaattaggcatggagaggagggaagagttctcaagccccaaaacagcaaaggcccagggtggagaaagtgtggtaagtgtgggatggcggtgatggaagagatgccaggatgatgcagggagcatctttgcatagtcccttttgcacacaggtgtgaacattctgtatgataaataagagtttgacttgctgggtcggagcttgaacattgaacattttgtcaatctaactaacagagagaggctctctaaaagacaatggtatttattcgagaatagggtactgcaacagaaatatgctcaccttagtaaactatgtgtgtattcagggaggtcaaagaaaacaaaggctttttaaaggaaagatgaaaaggattacacaattgttttcagatacttatccttggctgcaaggataaagaacaaggatgatgccagtcggaggttggacaggaagttgctgggcaggtgtctttgcagaaatatctttttgtgtgtaaagttacaagggcctctgggcaagatggcaggttttgcagtcttttgtgatagttcctgcacaagaacccttttgtttatggccttccatggctctatttttcagatttttaaaaacactagtgactctattttgattctgagtactttcacactttcaatgagccacaaacaagaggggcctcactggcccacaaaggaagactactcgtcctcccctcttctggccagagccaagctaacctcactgcttgcatggaaaggccacctttgtgtccttactggacttccagccaactcctttcttccttaaggaccttctgagtatggcttgcgggtatcactgaaaagaaagaagtctcttctttaccctcagttagtcctcacccaaatctcaccttgaattataatccccgtaatccccacgtgttaagggagagaccaggtggaggtaattgaaacacggcggcagtttccccaatgctgttctcgtgacagtaagttctcacgagatctgatggttttataagggtatcttccctccatgctctgtctcttgatgccttgtgaagaaggtgtcttgcttccccttcgccttccaccgtgaggcttccccagccatgtgaactgtgagtcaattaaacctctttcttttcctttagaaattactcagtttggggcagttctttatagcagtgtgagaatagacttatatggtgaggtagccacagatgccaacaacaactggctgcagatgtcagcctggtcttgcctcgggctggatgtatgtggccatgtgaggtggactggaggtgggtgttctcatttcacaagtggaagaaaatgcatagtgacaatgctacaaggactttagagctatcaagccagcgactctctaagggacctagagcctgcaaaaatgcttccaaggaacatgggaaggggaaggaaaagatggaaccagggcttgccatttctgcttaatcagagttctctcagtttattttttctctataatggggtcccctgggctgtcatgtttttaagtctcacagtatatacaactgtgtaatgggttgaaaattgctgaagagatcaaacgctatgattttatataggtaagaaaactgagggacagaaaactctcagctatacaggaaatggcggcagatccttagactgggatctggagctttttgttcccaacccttgccctgcctcctctaggctgggagtttttttatacagctgggttgtgagccctggctacagattagaatcacctgagaaaacattttaaaattaccacacctgagcccaccccatccatgctatcagaatctttagtggtgagacccaggcagctgtatttttgaaagcttcccaggtgatctgaatgtgcagaaagttctgagaagactgctgagtagaaacctttaatgggagtcatcaaagttgccttggatggaaaaataaaactgcaattgttgtgctggacataaacttttccatgttgctcttcaatattgctatatgtgtagaaaacaaaccagattcagaggcaaccacactttcatgtatggtgcaacattgccccaaaacttgagtctacagggtttcaaaggggctcatgatctcaatgtgaccttatgcctatataacgacatgcatataatcaaacacttaagatctgtgcatttcactgtatgtacattttactttggaagaaagtaatcaggtactgtttttacctccccagagtgatctggtgctaatgtcattctctccaagtggattctagggcacttgaacctgtttctgaagtttggtgttgaccccgtggtcataaatccagggattgctggttgtgaactgactctcccctgacatcttcctttgggctgctggccaattgaaagcagctccagggggaacttgtgtgaaggatatgtgtgcagagggatgcattcagatgcctgtgatgttgcagaggagtatgtttcatatcctaattacatgaagcttgttaagctgaaagtgttcagatgtgcctggttatgtcggttaagtgtcatcggggcatcacacagagcggggatacagaatgtggaatctcaggatgtggagagtcccttgggggcatttcctcctgtctgcaaggggctgggtgtcttggtcttccaatgtcctgtttatatctactgagtacaactccttagcaagatgcctgaagctaaggagccctttgttgtagctaaggcgcttgtgtacttggtgctttgcaagaagtgcaatcatcgagaagagacaaggtctttctaccccctctctcccgtggaagcctatttatctccgcgatagacagtttgctcttcattcacttgtctaatctatctcccagcaaactaatcttctcactgaaaaatgttgagctgttacaatttcaaaactctgaatgtctcacatatttgctgaaattttccagtatcccaggggcctggagaagtctctaagcctttgttttgtatcctaggccttgatactattaataataggaagagctgcattgtattcatagagctgatacaatgcaccaggctttatgttgggtgtgttgccttcactatatgctatttttataaaactgaagtaagatttacatacagtgaaatgtatcttaaatgtgtaattacatgagctttgacaaatgtataacaaccaaattaagatatggaactcattaccctagataaacaatagcaagaccattcagattttgtttctccttttttcccagttcctttcaaataagttttatatttttaatcaacaaataacaattgtgtatattttggggatgattcaatgcatgtacatattgtggaaatatcaaatcaggctaattagtgtatccatcacttcaaatatttaacatctttgtggtaagattttctcttttctcacatcagttttggtaagttgtgttttccatttcatctaagttgtcgagttaattggcatagctgtttataatagtttcttaatatctttttaatgtttgcgggatctgtcaggacatatattctttttggtaatttatcttttctctctttaacttgtttagtattataaagggtccaaacattttattactctttccaaagacataacttttggatttaatttttatcctacttttgtctgtttcctatttcactaattacttctcttataatttctgtaaggtaataaaattaatttccttggtcacttcctgttcctcccacctcccagtacctggcaaccactgatctactttatatttctatgaatttgattattctggacattttattttatagtcacagaatatgtgccttttctttccctcaacatgttttcagagttcattgacattgtagcatatactagtacttcctttctttttattgccaaattatattccattttatgaatagaccacactttatctttccagtcatcgattgatggacatttgggtggtttgtactaggaatactacgtataggttttaacagtagaattgctgagtcgtaagaacctatcttgagaaaatgtcaataggttttccaaagcagctgcctcattttataatcacagcagccaagtaaatagtttcaacttctccacatccgtgccaacacttgttacattcttttttattttagccatcttagtgtgaagtggtatctcactcaaaataatgtatttcctttgtgatttctgccccaacctatggcttacatagaagtgcattctttaatttccaaatcttcagggtttttctagggttattttgatattagttaacattactttctaatttagttccattgtgatcagagaacattgtaagatctaattcttttgaaacttacatattttgaaaaattttatatcagtggaataatttagtatgtagtgttttgaaactggcttctttcacttagcataatgcattttaaattcttccatgttttgtatatatcagtagttcctttgtattgctgaatagttttccatcatgtaaatatactggaattcgtttctccatttgggttacttttagtttttgacgattaatcatttgtgtacaaaactttgtggagtgaaatagctgtgtcattcattgagtatatgtttgactttatagaatttccaaggaattttccaaacatttccaaggaacttttaaaagtggctgaaacattttctatctcactgacaatgtataagagttttatttgttccaatcccatccaaaacttgatattctcaatgtttgttttattttaagctatgtgtcagttgcacaaaggtgtcaattgttttaatttgtatttccctgatgactaattatatttaacactctttaatgtgctccttgggtaacatgtatctttggtgaagtgcctgattgtgtcttttcttttttaatatcttcttagtattgagttttaaggattgtttatatattctggatacaagccttgtgttagatgtatgttttggaaatatttatctcaatctgtggcttgcctttttattttcctaataataatgtcttaaaaacaaatgttcttaactttgaagtccaatatatctatattttttctttttaaatttaaactttatattttcagataaacgtaggtccatatgcagttgtagggaataacacagaaggacttcatgtacccattactgtttccttcattggtaacattttgcaaaatttcagtattaccaccagtatatgatattgataaaaccaaatacagaatgtttccatcaccacaggagtcctcatgttgtcctttatagccacacctactttcctcctgctcctatcacccccttaaaccttggaagccacaaattgttttatttctataattttatttcaagaatattatataaattgaatcatacagtatgtcaccttcaaagactggcttttttcactcagcataaatcccgtgaggttaatccaaattattgcaagtatcattcgttcattcctttttttatttcgagtagtatccccacagcaggaatgtgcacagttagctccaccattcacccactcaaggacattttggtagttttcagcttttggctgtcaggctgtgagattcatgtacaagtttctgcataaacataagtttcattctctagtataatcgcccaagagtatgattgctgggtctttggtaattccgttattagttttaaaagaaactttcaaactattcagaataactatagcattttacatttcatgagcaatctgggagcaatttagtttctctgcagcttcacagaatttggcgtaatcattatttttaaagatttctgccctgttgagaggtgtgcagtgaattctgggtgtggttttaatttccatatcctaatggctaatgatgttgaacatctttccagatgcttatttgacatccatgtctcctcttcagtgaaatgtctgttcatgccttttgcccaatttttaattggatttttttaatgttgagttttacagatcctttatacatttaaaaaatgaggctttttttgaaaatataatttgcaaaaatgtttcctgttctctaatttgtctttttattttcttgacaggctcttttgcatagcaaaatgattcatttcaatgacattcagcaagtgcttttagtgtaaagtggaaaaactctttgcctaagcctagatccccaagattttcacctatgtatatatattttttaatttatagttttttgtttcacatttatgtccattcatttcgggtttttaaaaaattgtttaggttgaggttcagattttttattatgggtgtccaatttttccaccaccatttttttgaaaatactacaatgccttcattgaacagctttcacacctttgccaaaaataaattgggcataattgtgttggtctgtttctggattcccagttctagtgatgtgtttgtcttgctcctacaccagtgttacactgtatttatcactgtagctatacaggaagacttaccgtagggtagggtggtacctcccccttgactcttctttttcaattttgttttagctgttctagagcctttatctttctatgtgaagtttctaataagcttgtctattatgaccaccaccttgctggaattctgacaggaattatatattaagcctgcataccaatgtggaaagaattcatacctttacgacactgacttttccaacccatgaacacagatgtctaattatttagttctttgatgtcttctattatattttgtaattttcatcatctagatcatgggtgtgttttgctagaattatacctaagtattttacttgaagcatttgtaaatggtattgtgttttttatttaggaaacttggttgtccttagtatgcatatagaaatgaaattgatttttgttgtttttgtatcctgatatcctgctgaacttaggcactagttctaggggatttttgtagattccttggaattttctacatgatataacaatagtaagagcacacatacttgcctttttcctaatcttaagagggacatattcattttttcaccattagatacgatgttagctataagatttcaagtatcccttgtatcaattagaaaatcgtttcgccaggcacggtggcttatgcctgtaatctcagtactttgggaggccaaggtgggcagatcatgaggtcaggagttcgagaccagcctggccaacatggcgaagccccgtctctactaaaaataaacaaaattacctgggcgtggtggcacgcgcctgtaatcccagctactagggaggctgaggcaggagaattgcttgaacccgacaggcggaggttgcagtgagccgagatcacgccattgcactctagcctgggcaacgagagtgaaactccatctcaaaaaaaaaaaaaaaaaaaattggttctattacgaatttgcttagactgtttatctggaatggatgttagattttgtcaaatgttacttcacctattgaagatcatatggatttcatttttagactgttaatgtgacatttattcttaaatattaaatctttcttgctttcttgggataaaactgacttagtcgtgatggattatattttgtatgtaatgctgcatttgatttcctaaaataatgatttctgctggtatatttatgagagataatggtttgtagttttattatgtatttgggtttgttatgagagtaatgttgctttcagagaatggtttggaaagtatttccctcttctaggattttctggattattttgtgtagatttgattaagtgttttgtgctgttcactagtgaaccccttgggacctagaatttttttgttggaaggttttaaaatacacattcaatttcttgaaaagatatgtggctatgtaggttattcgtttcctcttgattgagcttttatagtttgtttcttttttaaattgcttatttcgcctaatttgttcaaatttactgacaaagttatccatagtattttcttactatatgtagtatctgtgatgaaaacactgctttcaatttggatattggtaatgtgtgtctttactcttttcttcttgttcagtttgactatggttttatcattttattgattgatcttctcaaataatcaggttttggtttcattgttttctgttcttctaattcttaaaattcattccattctgtttactttggatttaaataattctttttacaatttcttaaagtgagtgttgctacagtcattgatttggaacatttatcttctctaatggaggcattcagtactataaatttgcccctaaatactgcttcagcagcatcctaccaattttgtaatgttattttaattttcattcagttcaaagtgctttatgattacccttttgtgtttttgaagtcgtttctagaagtatttcatttccaaatatgtgaagacattctacatatctttctgtaattgatttgtagtttaattttattgtggtcaaagaacatatcttgtattatttgaatccttttaaatatatacagacatgttttattcctcaattatagtctaacttggtaaatctttgtgcgtttaagaagaacatgtattctgttgtagttgggtgaaatgttctataaatgccaattgggtatttgttgatagtattgttcctttttctataaccttactgatattctgtgaactttatcaattattgagggagaggtactgaaatctctgaatataattgtggagttttctattttttcctagatactacttttagtttttgctttagttattctgagagtttgttatttaaatgtacaaacctgtagaattttttttttagtgaattgaaccctttgtcattattaaatgaacttctttgtccttagtaatattctttgcttgaaaatctatttggtttgacatgaatatagatactccaactttcttttgattatgttagcatgatatatcttttccattatttacattaaacttagttctgtctgtagattaaagtacatcatttcttctaggcaacatatattggatattactttttaaatcaaatgtgacttctctgccttttattttatatatagaacatttatatcaattgtgattattgataaggtgaagcttaaatttacctccctctattctgtatttgcttcatcttttgtctcattctttttcttcctgctcctccttcttttgcattgaatgtgttttcatgatacaattcacttcctttaaaggcttattacctataactcttttgttacattaacggttgccttttgcatttatagtatataaaattgatttatcacaatctacctttaagcaatatgatgcgtcttcacagagagcacattatagtaggatattttcatttctcttctattggcctttgtgctaatgttgtcctacgttttctttaacatatattgtaaacaccattccacattgctgttacattctacattgttgctaattatcttttgaaaatatttaaataataaggaaacattgtatatttgctcatgtatttaccacttcaggtgctcttcattcctttgtgaaaatccatatttccatccattgtcatttttcttctgcctaagtaccttctttaacatttcttgtactaagtcttctcacaatgaattttttcagcttctttatgtataaaagagtctttattttaccttcattgttgaactatattttggatctgaatagaattctgggttgacacgttggtggttggttgttttccctctgtggagtttttttttccactgtcttctcacctgtcgtcttttgatgagaaaactgctatcatcttacctttatttccctatatgtaatatttctttggaactaaatattttaagtcactttcacatttgagtactggtaggtggaaaaataagatctttggactgtgaaatctgcctcttcatctctagactcggtctaaatcctgtgtatgaggcacgatgctgggcacaagagatatgcagatacataacatgtaggtcctagggcctattttcaggaaactcatagtctaatgaaggaaacccaggtcacttcccactgctggaaggtggcctcctttctgtcttcctctctatccttccaaatacacctttgactttgaaagctgatacaccttcttaataagccagtcaattgattcctctaagaatagaaaagggcttcaagaatagaaaagggcttcaataacaaagctggtaaaagtatcactgtttctaaatggaagtgccttcctccccaccacagtaactttgatcgtctgggttgttaaggtgttagacttgttcttttcatacctgatatggttaggctttgtgtccccacccaaatctcatcttgaaattgcagttcccataatccccacaggtcgtgggaggcaatttaatccttggggaagttaccctcgtgtgaaaaagatagatttgaatatcatgtaatagtgagttctcacaagatctgatggctttttaagaggcttttcccccttttgctcagtgcttctccttgctgcagccatgtgaagaaggatgtgttttgttttgtttttgtttttgtttttgttttttttttggcccgggttcaagccattctcctgcctcagcctcccgagtagctgggactataggtgcccaccaccatgcctggctaattttttttgtatttatagtagagatggggtttcaccgtgttagccaggatggtctcaatctcctgacctcatgatccacccccttcggcctcccaaagtgctgggattacaggcatgagccgccatgcccggccagaaggacgtgtttgtttcccgttctattgtgactataagctttctgaggcttccccagccctgcagaactgagtcaattaaacctctttcagttataaattacccagtcccaggtatgttttcatagcagcatgaggatggactaatataacatccaaggtactgatttgcagaaaggtaggagttaggcagtaatatgaatccacatagaactaaaagtatgtttttgttgcacttagtaatgaggggtcaccatcactaagccatttttcttcttgtgttgatcatcaaggatcagagagttcatagtcctagctgggatcatgggctcatcgcttgagtcgggtttactctgcacacggatggataatcctatcaataatgccacaacagtgcatgtggttcccagtgggagataggagtgctgttatacagaggagaaggaacagatgtccaccaggtgaaaacaaagaagcccattgcatttacaaatattatgaccagtaagatggtgcaatgtgaagactcttccctgtccctactaagcaccaaagtattgataacacacatatctcagctcaacttgtcaaagttgctggttttcccacagcttctcatctcagtaattgtttgcaaagagttgtttagaagtataaagcaatgctgatattcataatatttctactttttagggctttatctagttaatttcttcttaaaaatagaatcaaccttgaaacgttgattaattttttttttcagaaaatgttacatgcggccgggcgcggtggctcacgcctgtaatcccagcactttgggaggccgaggcgggcggatcacgaggtcaggagatcgagaccatcccggctaaaacggtgaaaccccgtctctactaaaaatacaaaaaattagccgggcgtagtggcgggcgcctgtagtcccagctacttgggaggctgaggcaggagaatggcgtgaacccgggaggcggagcttgcagtgagccgagatcccgccactgcactccagcctgggcgacagagcgagactccgtctcaaaaaaaaaaaaaaaaaaaaaagaaaaaaaaaagaaaatgttacatgcaaggcacacaatattaccaatgcttggaaaaattagatttgaatttcaaaagcgtacgtagtgaagtggctctatgccttgggaagtgtatgctgatgtatttactatgaaatgtgaagcccctattctatagtctgctgcaaagcactccagttcttctgaatgttctgtacggtacataatttgaactgtaataagacaattatttgtatgggatttgcaaatattttcatttatagttgtctttgtgacattctaacatcaccacatgtgaaggtcactaaaacaatgtacctaaaaatgcgtattaatattaataaagattcctaagtaatatatcatataccatgttcacctctgggctcatagaacatttggtctttgttttatttagttttagatttcaatgactctgacatgactggacgtaaaccatacataatagtaaaattctattctggagcctaggatttgcagcctaaggcattctgaccgggagtctgcccccatcttctttgtctgctccaccctttcctccactgcagacaaggtaataagtataactctttgtttttgactctttgaaaatcagagaaaacgtagaggagttctttttttcttcccccaatgcatttcttttatataaaggacattttttcaatttaagctctgtgagggcaagaattctcttccacgctctgtcctagcatctaaaacagtacctcacatagatgctcttgggtgttgtttaaaaatgcatgcttatagcaaccaatgcacaacgtcttacccaaaaccaattatcttaaaatcctagaatgggagccttgtcatggtcctgagcgaggtctgtcagccttattataataatgactaatgagcaatctgcacaaggacttgggtttgctcgttatgtctgaggttgcacaatgtgttaatgatggagtgaggaattcagtctagcttggatgattccaagtcgatgaaaaggatatatttttgtcattcaggagaaccaccctggcaaacacacaacaattcaaattatctcaagacaactagaaatgattattttctttgcaaaacaacagagggacctccctttatctggtcccagcattaaccaccagatatgtaaaggaggaagtctttgaggttactgcagccgcagacactgtgcaaactcatgaggagccccgaatgagaactgcctggctgaccaggctgacattagaagcaagagagctcatcataccacgcaattgttgttgttttacttcactgcatttgtggttgttggtcatgcaacaagaagtaactagaacagaactggtaatgggcagcgtggggtgctgacatagggatgccaagtatgtgcagcactggcttcagagccaggggccacatgggaccagggagggtagtaagctcccagcagaggctggaggacttgagggtgctgtgagtgagcgttaaagggaaaatgcctgaagctggagaaaggagacccttgatatgaggtggcaggaggtttggcctcactgctgctcatagaaaaataagtaatggtgaataagatgattaactgagaaaatgtccaggcagtgtgtcaaaggtgccacttggccctttttctagttgcctataacaaaatgagagaggaaatagatgagataaagaagaacctattaaatacataggagtcactacctgataagtctagaaaataaactatttcttattcccagcttgttcagagagcaatgattctcaaatcatggaactgcctccaggcaaagccctgatccaggactctgtgggtaaagcatggttgaagaagaaagcatggatttgactttacccttctgtaaaatctcagaaaggtttagggtggcacctgaagaccctttcaaagaaacaggttgtctaagccctgtcagggcaggactgcaggaccctctctgtgaatgagtggcgtctccagccatctctgggatgttgttcctcagcagcatcctggtaagcgtggcctagaggagacgtgtgggtgtggctttcatcaaatggcatgaagtccactaagttttagaaaatatttgcagagttgtgaaggaatcctattgacaggaacactgtccactgggactaaaagcgatggagacagcaaacaatgaaaggagggtttggattctcaaatgtctacacttaagaagcaagcagagaaaacagctctggtgcagacaagtgccacatattcgtggtgaaggaaggaccattcagagagtggattccagagcccagggtggagccaagagccatggaaagttttctgagcagttggacttagccctgcacaaagaactgccacacatgcgtggctggacttcaggatctctgtgaaccagtgactcacaggctgcctttccctcttttggaaaaggaatgtctccagtggtggttttatgcctgtcctgcccctgtgttgagtgtgtgggtggcaggtgatgtgtttatttccattcgtgggtcttcagatggagggtaacaatgctttaagagctggactgaagagtgacccaggagcagcctcatcagaacctaaacttgattgagaagttgacatctctttttctccagcttgagcctggtgtgtaatacctgtaatacgcagccctttggaggtcttggaatgggatgaatggtttgtgcatgtgggagaaatatgaatgctttgtggccagaggtaacattgaggaagactgagaacatgctcccaaattctttatgcttcttccaccaagcggtggagtctgattcggatccctttccctttcatagggactagcctagtgcctttcctcttgtgaataaaatgtagccaaagtgaactttgaggctaggttggaaaaggtaacatagcttttctggctctctaaagatagttgcccttgaagcgagttgttatcctacaaccccaggctggtgcagatcccaggtacagcggctccagcaaggagccttggctggggttcctgttgaggacaaatgtccatcatcacctgtaagccaggaaacttcagattcctccatccccagccactgcgtaactgcaaccatgtgagaaaccccaagtgaggaacacctggagagctccagccaacccccaggactcgtgagaaataataattaataataataggctgggtgcagtggctcatgcctgtaatcccagcactttgggaggccgaggcgggtggatcatctgaggtcaggagtttgagaccagcctggccaacatggcaaaacactgtctctactaaaaatacaaaaattagccaggagtggtgaggcatgcctgtaatcccagctactcgggagcctgccacaggagaattgcttgaacccaggaacccaagagggggaggttgcagtgagccaagctcacaccactgcactccagcctcggtgacagagcaagactctgtctcaataataataataaatgactggtattatttcataccactaagctagggttggcttattatgcaaacaaccagcaactctgtacaatgagccaggcataggagacacgagaggatagtggggaccgtgggagaccacagaaggtgcttttctgctcgtcactgccccaaagaaactggaagtaatttccttattttgaaaaccctgggatgagccaaacacaatttctgtgagcaggactctacacatgcactgcctgcacgccactcctggggcaagagctagttagtgtgattgacactgggatgcagagaacccaagcaacaaaaggcatgccctcttgccaacctgctcttctctctgctctcattgcttcccattctgttggtgacttcaaaaaaggacatttccattccacagctgtatgcaaagctatgaagcccagccaggctgaccttctggtggcacggttaggaaacagtgtgtcttattttcggaaattaggaattgctgaccagaaagcccaaacgaagaccataaatgctagagactgacaatgctcagaggttttcggggtctgactctgagctgcaaaggcaatgcttatttattctttccatttaatacagttcagtaacctttagaaatattttgaaagttgaaatatgcagtacaactggcagcatctagacaaatttatttagccggagcttgtagcattaatcagtatctggaaatgaagggcttctatctccactcagttttttgggggattgttggaaaaattaaacattttggttaaacaattttttgaagaagcatttttgactcacgccatgcaatccgagcaagtgtttttgtagaagagttttattgtcaggaacagggctttggaaaccctgaccaagaaggccttaaccttcccctcagcttgactagacattagagggacctcttcataccactaggccctgacctccctgtttttctagagcgtctactatggggaactcataattgcaaattctttctctgccccattgagatgtaaatatttttaaaatcctcttgccaatttggcagctcaggaatgccttttccaagaagctaggagccatcccttggaaagggaaccactaaaggagatggcatccctatctcccagtttctgtgggagagtaggaactaacatcagtgggctccaattagcaaatacagatggcccaatcatagagaaaaacatgtgtacactcaggaataagtcaacgtgctgggcacatctcatggatcaactcttccccacaccacctttccccaccttctttccaccagtgcagcccagcgccaaaaaccctcctgccttttgtttcagctgggttaagctcagactgagttctagcctctcccgaattgcgatagctttgaataaagtcttccttgcctgtcaaactctatctggtacattttttttgctttgaatcacaccattgttttttagttatttatattttcatttatataagattttgtatacttatattctgaactttataggagagcctgttcacttcttgcaggaattacgatgtttgtgggttgtcgttggtgtgaattccaaaccaaatgttgcattatgattgagcgaaaggcaggccactgatcttccagaacagcctcaagtcccactgctcagtgtgcccagtggggatgttggaaacagaaaagatacaaagaagtccgtggttcagaacccaagggctcctcgaaaggcttggcgtcatctctaataaagactcggcttttgctcaagatcccttatgcttgaaacctaacagtctccgacagtgtgttcttgattattccagccacagaagaggcacaaagggtggcctagacccaggtgacttcctgtggcactgggctgggccttctctggccaaatctagacttgttagcttttgccagaatttgtgatctgagccacaagagcctttttcctcacgtagtctatttgtcacttctgcttctccaaagagagtgaaattctgcaggcaacagccacagcttctggtcccctttaacctcaccctgtagtgctgggcactgagcagatattcaatgtacgtctttgttggcttggctagaaagatatttgtatctgttacttactaactgcatttcccataggctagctagcagtgctggcctttgagaatctgtgggcttaggagaagtttcctttgaagcttatcaggtataagatcccttcctttgttaacccagttctcctatttcctctctacacacacattggccaccacttatgcaccaatcactgtgccagacactgggacaaaaacgttaattcaagtcgctaatctgcacactgaattgagagtagatttccttcgttaatagattttgtccacctaagaattcatttactgagtgaatacgaaatgtgatttgattccttcaaagtcggtttacatgagcaactcaggcacacatctactatgtacagctgaatgcccagtttacatctgtagaagcagaaattaatttatcatgaatgggaggggaagtagagatattatcttatgtatcctgattatgtgtccggcaatttggcaatctttatgtatatgttttcttatttaattttcacaacagatcttggagttaggcagaatcgttacgcttactggattgacagggatacggaggcttataacaattaaatatctccagtaagtccacaccatagggtacctgatatctgaacccagttctgtctgacgtggaacatggggtcccacaaggggggcaagacttccacagattcttgggtcagtattattttcatgagggtacattgcctcttcctcactgttaagaaagcagattgcagccaggcgcagtggctcacacctgtaatcccagcactctgggaggccgaggcgggtggatcacgaggtcaggagatcgagatcatcctggctaacacggtgaaaccccgtctctactaaaaatataaaaaattagccgggggtggtggcgggtgcctgtagtcccagctcctcgggaggctgaggcaggagaatggcgtgaacctgggaggcatagtgtgcagtgagccgagatcgcgccactagactccagtcagggtgacagagcaagactctgtctcaaaaaaaaaaaaaaaagcagattgcagggaatattactcagccataaaaggaatgaggtacagatgcatactgtggtgcagatgaaccctggaaacattatgctaagtaaaagaagccagcatgaaaggtcacatgttgtgtcattctgttggaacaaaatatcaacaacaggcaaatccataggagcagaaagaagatgagtggtggcccaggacaggatgaaagtgaaagtggggacagctaatggatctgaggtttctttttagggtgatgagaatgttttggaactacgcagaggtgaaggacacacaacatcctaatgtactaaatgctactgaattgtgctctttaaatggtggctttatgttatgtgaaatttgcctcaattaaaaagaaaaaaaaaaacaatagaactccccactaatctggtgagtcggaagaaagggcggctgctttctgcactggcaaggcctaggccatgttctaacctgtgatgccatgctgtgggattgcaataggaccaggtgggcatccctgcaaattttgacttggggtctgaattagcacttgttggtggaagtgggtcgtcagggatgagtacgagggatccatgccaaggttatcgcctccaagggtagcacagctgcagagagctcaggctctggctgggatctagcccagacccctcccagatgggcaattcttcctaggctcttccaagcctcagtttcctcacctgtgaggcaatatcttcctcttactgattttgtgtgggttaagaaccaaggtatgtaaagacccagtactgtgcctgacacattcccagtgagcccccagccagtgggacctcacaggtcagtgctctgccatggcacagagaccctgttggtaaaggtcaggttgtgctgtgccccacatagctccagagcatgcaggttactcagtagggcagtaaggtgtaagcacatggtcttgagggaccttcccaaactcccccatacataatttccttagcaaatgccctctgctttcccgggccctatggcaggtctgattttgttctactgattccccacgggccacgtgcatcagcttcagaaacacaggagctggtgttcacacacacagagtccttggggaggctctcccagcccacaggcagtgagattcacaggtgccttggaatttatcaatcacacagtggctcgtaggaaccatggccatgacagtcccttctctgaaggacgaaagtgcctagtgcaagttgccttgacccagagaacaaagcgcccttctcagggtgcagtgtgtttacttgcaatctggtgttcattttcagaatgtctgaagcatcctttggaccaaaggctgctgcataatagaggcccacagctcttccagggctccttgacatttgggaggcaatagctctattgttctctgcctcaaagatattaagcacaaacccttgaggatgctttctgtgtctttttgcttgaggcaggagaaaagcaaaactttgtcttttcctcttgaatgtgaacactcaggggctaaatcaagaaacaaccaacacaaaatcatatgcaggagggttggtagaatttgctcttcggcttagggacagctgcagtaagctttgtcatgagcaatttgaagcctcaagaaaaagtcgcactcaagccccctggctttatccagctgagcatgactgaagtcccagctgtcctcctctccacttgaagctcagccttgcgtacctgcttttgtagccagagcattgtgatgagagggaggatgctgctccgggctggattcagggtgggatcacgctcaccttagatcccagcttgtccagcatcgccgcctcctggccgacaggctgtgctgctgtggttctgggggccatgcactacagggaggtctgcaagtgtccactctgatccattcctgaccttgagagtggctgtccttgtgactggaatatagcctgaggggaacttttaggggtgccagtcatgttgtgttgcttggtctgggtgctggttatatgaatttgtgcagtttgagaaaattcatcacacattcgttatctcaataaatacacctttcaaaaggtatccctgaactgatctgcagtagctgcactgattccccatccctgttcctttacactgaatgatgagttggacatgcccatggtaagtctctgagctcgtaaggccttaatgaaaggttgcacatgggcactgaagacctttgaggtaatgaaggtgaggaagagtactccagatggagggaacaggcatgctggagctcagaccccagagacgcattagaaatgctggaagccccatggaagggcagtgtctgcatgctattgacgtgagctgaggagtccaaggggttcttgtaaaatacactgccccgtatctggatctgaccatctgacttcgagtcccctgtcctttcaatgtctccacccggcccgcctcagacctcccacctacttccactcctggagggacaggctctccaccctatgttgtgtcctgtctgtgactgagccctaagtctcaggccacacctttgttctcgtcttcatttcctgatcctgtccttgcccacgtcctgcacccagatcagaccccaaacctcctctggtatttttgtcttcaccaatgtcctggtgtgggacagctggtctacctggtaacagcaaagcctgccaggcaactatcctgtctctatcagcactgcctttaccacagcggccttgtcctgctgcccacctagcagcggaatgcgatattttagagaacttttcctcctaagaagaaaggcagcctgtaaaaactatgctctttttttttcctgctccattttcagtgaaaccagaggacagatggtcatcgtcccccatgttaaagaagaaaaaaatctcacaattaaaactgaaatgaccagcatgtaaaaatatcatctcaccagacttctaaaatacaaaataaatagcaacatttcctgattgcagtaaagctcaatggtggagttctctttttcagagtaggccaaataatcatataagctcacaaaactttaaaagaacataaatgatttctttcatttcttaaccaaggattgtgaggcactaatttacatgacctctgtctgtcttcgcggcaggggactttagtgcagttgtgttcagaagggagtctcatgaggaccggggccacttggagcctcagtgctattttcgtgtcagcagacaaaagtgggaacaaagcttgccttcgtttcagatatgcaggggagcttgctgctgcacgaagctctcagaaatactcggaagatgaacaatggctcccagagaacatgagcaagacacatttcaatttcagaaacaaatgcacatgaaagatcatcttttattggagaacatacgttaagttatcctcttttcaaaaacaaccaggaaacagtgacctttccaatgccttcatcagctgcagttttaggagaacataataaatgctactagacaccgtggagcagaaaacacaaggattcaacaaattaaactttggaacacacaccaaagacacccagagtggacctgtgtatacagtcactgctattgtattattttttccatcaaaaagttgacattcagaatattcaagatatatgactgccctttcagacttcatatttggatttatttcctgttgatgctgtgtttatttagacttgtattaatgtcatgcatcagaaatgggttaccatgaaaacaaaatttcttacttgactttttgctctccaaattcagcatggatgccagtaaaagaatgagatgttaggttaggtttgatgcgcttatagctctttatatgtaaaagtgtagtcactgaaatcttttctggtgtgattttccttccatcattttgtttatgagaatgtatgagttaataagctacaaagagctagaaattaaattaggtttaaaattcagggaaatagaataaagagaataggcttacatatatattgggaaagtgatcacatctggatggtttggagggcctcaggagaaaagccagttccctgtgctagaatttgtcctctttcctgcttttacggcttgcacataggtttgtattgtcttcctgaggtttacttaccagcaaggtttcatcaccaccaccagcttattttcaaaccaagtatgattgttgtgacttacaaattttcttgtcttcttcttgttcctacactcactttcttaggctctgggactatggaaaggacaaatgacaactgccacgtgagctcacctcagtgtaagatgacttatggggcctcctgtatactgggggcaaagctaaccctgtttccaactgacagggctatgcatgtctcctcggacttgatactcagaggttttttttttttttttttttttttttagctcaaaatatcaagtaaagtaaatcatttaatctttcttgggaatgaactgttgtgttggccaataatgaacatgaacatgatgcatctgaaagtagaagatgctaatcttgcaaatctattttcttttccttaatgagtacaaagagattttttttttaagtctgtggtcctgcagaaaccaaaagattatggcatacaattatctcactgtcaaaaattacactttggttgaaaatgaagtctactttcttgaatatttagcctttaatttttttgttttgttttgttttgttttttgagacggagttttgcgcttgttgcccaggctggactgcaatggcgtgatctcagctcactgcaacctctacctaccaggttcaagcagttctcctgcctcagcctcccaattacagctgggattacaggcatgcaccaccatgcccagctaattttgtattttttttttaagtagatatgaggtttcaccgtgttagccaggctggtctggaattcctgacctcaggtgaacctcccaccgcagcctcccaaagtgctgggattacaggcgtgagccaccacacctggcctaattaatctctctttttcatttaagctcattctccattacaagttaagatatgacagccaagcatttactgagggctaataatgcagatgactgaccccaatggcagccacacctggagaggtgccgagcacttgcaactctggtcagaggcttgctccaggggtgaggggtaggagcaaagtcatccagatgagtgttcatctctctgggaagaagagatcagagaggggtctcgggataaagtagaaccaaagaccttgaaggtcaggcaagcttcagagagacttaacacaggtagttgcccaaggcagaaactctcctctatttcaccccatcccaatttatctgttaactttcacctctcaaatatctcttgaccacatccacttgtaaactgccctcttcccacattgtagctcagctaccaccactccttccttcctggacggttgaagcagccttctctcaacgttctgttcctacacactcactgttctctaacccattctccatgtggcagtcagaaatgcaaaactcatccttcccttctccattgcaaacattcaaggacttcccattgtctctaggattgagcctaaacattttaatccttatgtcccaggcccttcacagcctgactcctacttgctactaacctcatctcatgatgccctgacttggttcccccagcactcaagtcttagtcgatttgtttagctcctcaaaaacaccgtgctcttctctgtctctttctgtctctgtctccctctgtttctctgtctcttgtttcctcctccatctcctggccttctacatactatcccctttgcttaggatcctgttcttctctttcttgcctggctatctcctgtttatctactaagaatcagattaaatatcacttcgcctgggaagccttccttgaccctcatggagcccatcagagtatttttcatactttattatccctatttgatttttttattaggctacatatagaagtccataaattatggacttcagccaaatctatttttgtaaagtcatattcgccatgcccatttatgtttatattgtctacggctgcctttacactgcagtagcagaatagttgtgacaaggaggcatatgacccacaaatctcaattattattatctggccactgacagaatgagtttgctaatctctgctagaaacaattagctcatatatcccggcattattccatcattatgaccggggacagtgcccagcagtagtcatttattagatatttgttgaatgggtgaataaatgaatgattgttgcacacacaggcagaggaacacagcactaaagccagacagtggacacaactggattacctttgcagaaggtttgctatgtagaaaaatactaagcactgaggttcttactgctgctattgctgatattatttctaccagttatgtattgactgtttaccacatgccacatacagagcgaactgacttacctggcttttctcatttaatcctctccacaatctaatatggctggttctattgtgatacctattttacacagaaatcaactgagtctgagaaaattcaagggactggccatcattctacagctaggaagtgggccatggggagcccaccattttaatctctatgcttccaaatgtattatctctcctgtctatttgaggatcgtgtctttagtttcattttgctttgatggaaaacatcttttttttgaataattggctgggtagcgaggtgaatggttttttgttttgttttgttttgggtttttttggtagaaaattggccttctgtattggaattggatttctcacaaattttattgcagccaaaggtataaaatacattttcaaaatagttatattttagctgaaaacatgccctagtattcggctactaagaaaattataaaattataaaatcagaaactgcatgagagggactggtaagaaccaccataaccaaacaatttcaattacaaacagcagcagcattgctgagaggtgttttagtagttaaggaatatgagttttctcctgtgtgtaaagatctgatgagtggtggtgattggttcaagatgccaaggacatatcagctttgcgctggattataaatagcacaggtatttcagcacggtgtctgtggtactcagcagaataaacagttatatcctatactgacagagtggagtaatgtttagagtttgactttggccttcttttcgctcctaacttgtcaaagttggaatcacatttttattcatttatcttcaatccatgacattatatgtgattcatattttgtttgtcttttttcttgcttagtgagttatttactctaaaataggtccatagaatgaagaagaattgagtgcaaaataaaaagccaaagaaaacttatatttccaaaatttgatgaactagctggaaaaggcaatattcatgattgataaggaagcttgcttggttgaaggacgaggttgtccatccaaagggaaaaataatttgagcttagtgtcatggccgaagttagaagtgatggaattgaacatttgaagtaaaatcttcagtttctcttatgatacagtccttttaaaagtttaactatttgaattattaaacaaaaacctccaaagaaaagcccaggaccagatggtcctactagtgaattctacaaaacattcaaagaacaatcaataccaattcttctaaaactcttccaaaaaatagatatgagagcattcttagcttattctatgaggccagaactaccttgatacaaaagtcaggggaagacatcacaagaaaaaaacagaccagtttgctccatgaatatagacacaaaataccaacaaacccaagttagcagcatattgaaagggctatgcacagaaccaagtgggaatcatttcagaaacacaaggggtggttcaacatatccaactcaatcaatgtgtaagataccacattagtaggagaaggagggagaaaaaaaagatcatctcaatagatgcaaaaacaagaaaaatatttgatgaaattcaacaccctgtcaaggaaaaataaaaacaaacacaaacttgaactagaaaggaactctctcaacttgataaaggccattcatgaaaaatcaaagctcattcatactcaatggtgaaagactgacagctttcccctaagattatggacaaaacaagggtgcccactttcaccatctttccagcattgttctggaattctgtccagagaagataggcaagaaaaagaaattaaaagacacccaaattggagaggaaaaataaaactatctcaaattacagatgatataattttatgtaaaaaccctaaggaacccagacacacaagctattagaactacttaatgactttattaagatcaacacaaaaataaatgaatagcaatgaatcatctgaaaggaaattaagaaaaataattccacttataatagtggaatttcaatagaatgaaatgctttagaatcaatttaaccaaggaggtgtaagatattacattgaaaactgtaagatattgtggaaagaaattaaagaaaatctaaataaatagacattccatgttcatggtgggaatattaagacagtgacatggtttggatgtttgtcccctccaaatctcatgtttaaatgtaattcccaaagttggagttgggacctggtaggaggtgtttgtgtcacaggggtgaattcctcatgaagtgcccttcccaaggtaatgagctctcattctgttagttcacgagagttggtcctctaaaagagcctggcatctctcctgctccctctcaccgtgtgatacaacagctctccctttgccttccaccatgattggaagcttcctgaggctctcgccaacagcagatgacagcagatgacagcaccatgcttcctgtagagtctgcagaaccatgacccaaaataaacctctttttctgtataaattagctggcctcaggtatttctttatagcaagcccaaaatggactaatacaaatgacaatactctccaaatcaatctatagattaattgtaatccctatcaaaatcctgatggctttctataaagatagaaaaactgaacctacaattcttattaaaaaaaaaaaaattcaagggactcagaatagccaaatctgtcttgaaatggaagaacaaagttggaggactcacacttcctgacttgaaactgactacaatcctaccctaatcaggatgtataacactggcatacatatagccagagatcaagggaatagaattgagaatagaggggaaaaaagcataatatatggtcaattgatttgcaacaagggtttcaacataattcaatgggatggaataatcttttcaacaaatggtgcagagacagctggatatcgcatgcaaaagaatgaaatttgacctgtctcatgtcacatacaaaaactaagttaaattgtatcagaaacagaaattaagtgctaaaacactgctgaatgaaagcaaagatctaaataaatcaaaagatatcctgtgtccatgggttgaaaaacttaatgttgttaagacaaattgttaagctcttagaaaaaaaaaatggggtcattttttatgaccttagatttggcaatggtttctcagatgtgacatcaaaagtataaacaacaaaaacataaaatagataatttagacttcatcagttttaaaatcttttctgtatcaaaggatactatcaagagtaaaaagataatccacagaatgagaaaacattctcaaatcacatatctgataagtgtctaacacccagaatacaaagaattattataactcaacaacaaagactaacctgattaaaaatgggcaaaagcgctgaatagacattactacaaagacgtacaaatggtcaacaggcatatgaacaaatgttcaccatcaatatcatttgggaaattcaaatcaaaattacaataagataataccactctgtacccactaagatggcaacaataataatagtaagcaaagcatagcaagtgttggtgagaatgagaagcaactggaactcttccaccttactggtggaaaagtaaagcaatgcagccactgtgtaacacaatctagcagtttctcagtaagttaaacacagaattaccatatgaaccagcaaaatcactcccaggtataaatctaaaagaattgaaaacaggtgtttgaacaaaaatttgtacataaatatatatagttgtgcaattcaccatagctaaaggtagaaaccccaaatgcccaattgatgaataagtaaaatgtggtatatccccaaaatggaatggtattcagccataaaaaggaatgaattacttatacatgctaaaacattgatgaaccttcaatcctttacactatatgaaagatgccaaacatggagatcacatattgcatggtttcatttgcatgaaatgtccagaataggcaaatcaatagacacaaagtagatgagtggttactagaaactagggatagagagtgatggtaagtgataacttcataggtacagatttcctcttaggacaataaaacattctagaactagagagtgataatggtaatggttgcacatgtgaatatacttaatatcactgaactgtatgtttctctgtttacaaaagcactatgtgttccctactaaaggtttcagacacacaaaagcagtaagagaaaaatgaaatgtacctgtattccttaaaattaactacagttattttttaaaattttgatccttccagtctgtcatgtgcatatgggtgtgtgcacacagtatttattttcatttctaacaaaactgttattttacagtacataatgctttataatctgttttcccccttcctatatcatgaacattttcccattgtcattttgtattctcccacatcacattaaatgcctagataatattccatcttatggatgtaacataatttatttagccaatttctattgttggattctaacattttagagttggaatacactacagacattatcgcatccaacttatttctttcccgaggtttatagctgtaagccttaaacacatggcacacaaagaccattcacatgttgaaaacagagttaattttccactttccagctggatttgggtgttgtatgggctttggattcaccattcaggaacctgaaagatggaaatggtggtggggggtgtggttaggagggggaatgagccaggtgtaaaatagtgcccaaacatcaaaattctatcctgaatggttttgttttcctgaaaaatagatatggaagaccacaaaataggttgcattgaatctgttgatgacagttccatcatacaaaatagataatgcctcagagagaagcaaataagtagcagagcccatggcaatgaatgcctcctgtattgaagcagtactttgccttacccacagttcacagaatgagaacatcccatcacttggtcacactgtgctgagcttccctttgtgtttccagaggcgtatgagccaggcatgagaagcagttctttactttttcattttcattgacagtcagaatcagagaaatcaggatattattcaacaatgtctttagatccaggtgactcatatcagggtgaaagtaaatatgttcattccttgaggtatataagaaacacaacacatattttggatgccttgaagatcagtgaagctgatatgtatgtttcctaagacgtttctcatgataggtaagtttttctagctaaagccattagaccttacttgtcaccaggtcatttctcttgtgggtgacttcttactgactccttctgttggtttagttgggtgtaggagggtgcagatgaggcctcattaaattggctagatttaagcttaggcattaatccaagttggatttgttttaagaaggatcatttcttgacctttcttcctattacattgagtggatttttcttactgagttataagaggagggcatataactcaggcaccaattattttcctgtgtgtgtatatatatatatgtaaacaggaaaatagatatttatttgtgtttaatgacttgtgccagttacagaaggatttctgtatggccccagtatgtcttgactaacttgatgagtttacagaataaatatctatttatgtttacttgcaagcaaaagacatagaaataatatgtaatatatatataacatatatattatatgtttatatatatatattattatttctatgtcttttgcttcccattagactgtattcatggtacacagaaattttgaaaggttgttcaactgaatgaaagatgaaatatttacttccattatggtttctaggctttatgttttgattagtaaggccttccatcttcaacattactgtttgtttttaatatttctttgtattttatttctacatgtatatagagagtgccccctctcctacttagctctcttagccaccctggatttagttattttttttaatatggtgtgaggcagggagatgaggaatactatttcaaggacaccagctataaaaccttgttttccaataacagatgactactcagaatgcattttctctccttggaaataaaacataaaagaagtcctgcttgttgacagtggtagaaacttcattttatatgaactcctagtcactgaactcccaacagtcttattcctaataaaagctaacacaaagcttagacatgtgtttctatagccccttggtcacccttctaagggaagacattctaaagtcattcacaggtttataaaatgctttctcataacttgtgccagttacagactaatttccatacggccccagtatgtcttgactaacttgatgaactttatggaataaaaagtataggagataaggtcaaaacccctaagtccagaaaattctctaaagaaagacttctccttcgtgcctggtccatggaatttgatttatatgcaattggccatggggaaaaataaaagacccactgatgggacgaagcttcccaaggggtaggacttacaagcaagtcatggtgctcaaggtttgtagggaggtttgtgacctagaatctcagtgatcctggcttcagccttctactcttttgataatttctgtatggtttggctgcgtccccacccaaatctcatcctgaattttagctctcataattcccatgtatcgtgggaggtaactgaatcacggggtcgggtttttcccatgctgttctcatgatagtgaataagtctcacaagatctgatggttctaaagagcagttcccccgcacgtgctctcttgtctgccgccatgtaacacgtgactttactcctccttcagcttctgccatgattgtgaggcctccccagccatgtggaattgagtccattaagcctctttcctttataaattacctagtctcaggtatttcttcatagcagtatgaaaatgaactaatacaatttccttgatgaaagaggatttctcctttgctagcaaagggaacacagttcaaaccagcatctgtcagctgagataccttggtccttctttgtttaccagactatagacaagtgcaaagagcctcttctaaatgcagtggagctaggtaagttaaccagaaggaaggagaagcacactgagtgatccggggcacaacgaccactgagttattccaaaagaacaaaatgtcctcatcgattgaatcacttagtcacatgaatttctcccactagtgcatgttgaccttctggtggaagcattgcctcccacagaaactttctgcccttgttcccagagcatttcttcctagcgtagtagctcgggtagtgttagcaaaagactagaggtgactcagtaaggaggggtggactatcccgccccacatcacatgctgaactgagaaaacagcaaaggccagaggacattgctgagtggaggctgcgatgctgtattcacattgatctctgatgcaattaacaaattcataatgaacatattccacaaacctccctctggaaacttttgggagctatgcatgttttctaggaaccaggtgaattcagggaggactgaaggtttccagagcccagtcccctccaggagctcaccttggctttttcttcttaccctcttaaaatgtgttcctatttagttctttaaaaacatgagtcatgagcctgccacgctagtacctgctgggagatgagaggggagacttgtttcagttagagtctctcccttattcttttgtcagtgtctggccagatggaaattgtcaaattctgtcatagcaggaagctctgtgactatccagggtcatgaattatgttttttttttccaagctagagattgaaccattctcaggtctagaggttccttatagggatggaattccaggatttcagagggctcttcttatgaaaagaaaatattgctcaggcaccagttcactcatgtgtttgtgtgtgctggcaaagtaaagatggtttcttggaattaggttcagtatcttacacttactggcacctgaatccccatttaattgctgttaaaaccagccatagatctttctcttttccaagtttttgatctcccagaagtccaaacgtaccattaggtgccaaggaacaccacacctacttacagctctgtggtcatcacagagaaagttagtgggaaaagggcctggagctggctgaaggtgcatgctggcttgaggctggcacctctacccttgggatgttggcatctgaccttgtacttgggaacctcaccacagagaagcagatggacctggggctgaagcagccaagagactctgcttctgcatccagagtgtttgtggccaagtgagtctctaattcacaatgtcaaatgagcttgccttccacagcctcacctcccttggtgaaggacaggggctctgcgccagatatacttcagaatgtacaaagtggagcctctgtctgagccccttcctgagagctgagtggatgctctacaaggtgtgtcaatagctggctgcacaggtgacctctgctgggaccctggagaagtccctttggctgacgtggcaggaggtggctctgggacacagtgacatgtcccctgacaggcctaagtgacagagggttgctcgttgcctgggcttcaaaccaagctatgctgtttagcagactggaacaaaaactaatatcaagggggagaaaaatccgtggaaggggtattgggtgccagcatgcctttagcacttcctatctaccagcctgtgagctagggtggccatcacaggcttattgttatggtgtccttttgatagctgagactgaaggttagagaggtcatgacacttgccccaggttacaatgtgaagccaaggagacaagaccccagccaagactatctgaaatgagacaagacccccactaaggctgtccgactcagccgtatcaggtaaatccttcaggcctatgctgtgagtagagatggtatttaacacaatctcccaaaatcaactaaagatagtgaggaaaaaacacaaagtctcccctcccaccttgactcttgcagcttgaactcccctcctcctcgcgccagcagccttgaccatgtgacagcaaaaccaagtttgctttagcagattctgtctgctgacctgctgcaaagatctggggaggaagctactttcttttatgccctgtaactgtttttggtataaagccttagaagatgaagcctatcctgattcatctattccccaaatatctgtttttcttctctcctggggtctgaccttctcctcttctttctgcacagtgtcggctgtcacagatcgcaaatctaaatgagtcctataatttccccaacaatgtccaattggtgaacgtggcagctgaataggcactgtgtacgtactgaaaacccataggcaagcaaaaatgacagccgcttttttacaaatgtgactgaaacttaccaactcgtccacccccccaccctcactgggggtcttattattttcacaattactagttagatagaaagcaggtgtgtatgtgtgtgtgcacgtatgtgtgtgaagcttcctggttgctcagatacaaagggagaacacgttctgttggttgttttaaaatcttaaaaaaatattagctttcttgcctttactctccagcttacagcctacaggtgcaggaaaaccccaacggtggtccctactcagccctttgtgcaaagggtgcagacatttccttcaaaaaggttaggtgctgatttgcatggggcttacatgtacttagcatattgattgctcatttccagcccaaggctgagcacccaacctccggcgctgcccctccccttctgccacccacctcacgcctatctgctgcaggtgggtttttaactacaaatccaacatgtatttggggagctccaccttgaggtgagaagctccttcagagtgatggtgagtacctagaccagaaggaatcatgttttagaaaatacagtaataaagtttcaggaagactcatgttgctataattttaaaataatttaaaggccaagatgatatttctcaacatacagaactcagtttctttttttctttctatcactctggtgggaagaataagttgtatactgaccaagtgcaagtcacagggggtaaagctgagacctcccctagaattccttcttaagatctcacatttccttcctattctgaaggatatcagtcagtgcacatctgttaagatgaccaccaatgtcttgtaccactgttctagggaggtctgccttcctcgtcttcctggctgacattctgtattagggccccacatttgctcacacttttctccatatacacagaggccacgtggttgcttcatttgtgtgttaattttttgtatataactgctccgatcttcctcctgagctgtcccatttgctttataagaaaggggagaaaaattctagttcatgccaatcatcttggagttagtctcctgaaataatgtgtttaggatggtaaacctcagtcgcaactttcagatttctatcaccttccgttcctttccaaaccaaaagattaggtgtagaggtacagcgtgtcatgtgtttgtggcagaggaaagcaggaagctgtagatttacagggcacctagggaaccttcatgcgtcccctcctcgggtatctgcagggacgttcattgtcaccctggttgctgcaagtcacatggtcctactgagatcatattttcatttctattgctgagtaacaaattgtccccaaactgagaggcttaagattatttttctcacaatgttgtgggtcagaaatttgggaagggctcaaccagtcagtctctcatattgttcacccaaaatgtcagccaggactgccatcatttgaaagctcaactggtcaaatgttcagaatgactggcggtcgacactggtcatcagcttggagttgaactgggctggcagccaaaggactgacatgaggtcgaatcatggtggattcaggatagtcgagctccgtgcacagcacctaagacgtcagagaacaaatgtctcaccagcaaggaagaaacatgttgccttgtagcaccaggtttcaagagtaacactgcaccactccagcataacctgtggttaaaaatgacctcgaacctgcctgtactcaagagttagaaagtaacagggttctcaaagaacatgtgttgtggcagatatcattgtggacacatttggaaaatgcagtctgtcatggctgactgggtgttattctagatctttctgtgctaacctctctttgatgaattattataacctccatttaaccactagcttggaatgtggggtcaccttgttccttgccccagttcacccctaatgtagaatgtttgctggatttcaacttaactacttcctctattctcctttagagaccaccatggcagacacccagtggtctctattccttccccttgagttttgtaggagctaggaatttaggaaaggaaccctttgtgacttctgagatgagtcataaaaggtggtagagcttggggtgctccctcttagagcacaggctccatcctatgatgaggctgcagtggccacatgagaaggccctgagggtgttcttgctgatagctccactgctgtcccacctgacaggcagcaccaatggccagacatgcaggagtgaggatggccgctgatgtttcctgctcctgctcttgagttaccctcaggattaaagtcctcagttgaagctgtagaccttaccaagcagagatgagctgttgcccatcctgagtcctgagccaaagacagtgagagatcagaaaatggttgctgttgtttaagccactaaatttagagatggtttattatgcagtaatagtaactggaacatctgctaacccattaggataaatacaaagaaggcaacatatggacacatcataattaaactgccaaaaaccaaagtcaaagagaaaaacatagaaggagccagagaaattaacatgctacatacaaggaattacaattcagaaaactgatgattttatctcagaaaaaatgaagaccagaagacaggggaaaaatatttttagactgttgaaaacaaaacaaaaactttcagctcagaagtctgaatccattgtggtatcaaatgatgactttggagagagaaagatctgattagaatcctagttctatggccctatttccaatcctacaatgtggcattaatgcaaaaaatattatattaatatacaaaatatgacccatgcaagaatttacacctctgagctccggtttccatatattttgtttacaaagaaaaagtcctattgcagccatttgacagtgccattatgacattctgtaaacagtaaacatgaaaatgctttgtaaacggaactaacacaaagacttagtagaatctgaaacagacgtactcttgctttcctttgagcacacatgaaaggtatgtatacagtagggaagactagagttctagagtcagatgtgtaaggattagatggctctttttactacttgctgactgagatgacttatactgactgatcattcatcctctttaaacttcacttttttatatcaaatggtaaagtagtagaattacctgagaaagctgttgcaaggattaaatgagatacacaaagatacttcactatgcttggtatacagagtggctcaacaaagagtaggttttctactttagtgaagtatatattaaatgtatgtattcatcatcgatctgggaaatgtataaaaatgaggcaataggagaattcccactgtccaacactgagcaggttgtttatctccctgaaccttagttccccagttgtggaaatgaatgtgaagagtcagcacagggtgaatgtgaggcttgtggaatgtatacggcacttgtgtgctcaaacaaacaaaagcaaaagtaagtctgtttcagattctactaattatttgcattggttcagtttacaaagcatcttcatatttattgtctatagaatgtcataatggtgctgtcaaatggctgcaatgggacttttctcttcgtgaagaaaatatatggaaactggagctcagaggtgtcaatccttgcctgggtcatattttaccggaacagctagatggttactgccactctgaagttctctctgtgtagaccctccctctccacttccctcatgtgattttctattgttgggagtgggttctatttataccacatcccagtaggttttaaggtggtatatatggtattcaaatttgcaaatttggccaattgtgacatcagaaaatgttacggtgtagcacagccacgaggcttgggttcaagccccaggtctaccacttgggtgagttggggcaagaggcttaacttctctactctcagttggttcctcatttgccaaacgaggataatagcaaagtctagctcacagtgttatgtgaaggattcatgaattaatgtgtaaaacgtgttcagcacagtggctggcgtgttctcagtgccacgtggtggctgttacttatctccatgagattgcaaactccataaaggcagggattcttgttcattctgttcattgcttggtacgttgcggtgtttaataaatatctgctaaaagttgctgagtaaattttgtccttaagtgccttccatattgctaataataataaaaagaacaacactaacttctaaaataattttcaaagtaacgtgatcaataatacgtgatgctgttctcctgtctctgccctgagctcagttgcccctttggtgctggcactacagacccccacactgcaggatgcccagaacactcattctgttttctgtttctgcctccccctgcccagcctggcctgactggggagatatctatctcaaggtgtttccacctgcttccccttgaagacgttgatttccttctcaaagtctcccactaggataagcccccaaatcatgctagttatgaatcttaccagagtgggacggaatgatgctttaggcacaggcaaccttccccaaaccctgcaaatcactcagttccccttgagaaagaaatggcttgattggtggcatttgtggaaaggggcgggcggtggggggcggggggcggggggcacagttattgagtcacaatgtagaagtgaaaacacacaattcaaagtctaaaatattttaaagcttccctggactcacaggcctcccttccactcacagctttttgaagtagctctgtggacttacaccagagagatgaaaagctgaaatccagctgccgttcattcctgctttgagattaggaaaggtagagctgaatttgggctatgttactcagaagcttttccccagctgatggaggcctgccctggaggtgctcagctccatctctgctgtccaggctgtgagcaagaacacctaaggaaagccagcagcctccttcactctccctccccatccattcaggtacaggccacaagtctgcagcatctcactacaaaatcagcacagaggcagtgatcacaccacgatgaaaaaaaaaaaaatagattaaaaagagaggaaaaaatcagctgctagaacaaaagccaaacagaaatgtgttccttaaattattagtagtgtattagaggtgatttagcactcacatggccattcctacaactgcagagaccctgcaacatatcttattccctttgtaatgcggatggcactgagattgctctcatcttctgggcttataagcaaatatatttaatttggatgtaatacagccaggagggtgatttctccagatggcgatttaagcaacagatcaagagatgaattaagcacctcattccttcagattttaggagatctgcaggtgccagggatcctgcctccagcttgggtccagggtaaatttcggccaagatgaagcctcttattggctgcatgaattctagcctccttcattaacatggtaattatccaattagttaatgctcccttcttgagttgagtaagctcctggggggtaaagattgcaggtggaatcttgaggctataatagtggtattctactccttgaggagatgcatttgatgggtgttttttctacagaacttgattcagtttagaatacgaatcaaggtgaaaacaaaacaaatctagtagcaatcaatagaatttctctatggtagatctgagtaatttgagattaattagcacaaaggaagctaaatcaaaccaaccaatgcttagtgtctttatgagcaagatctcaaaagggggcctttaaggtagttattagctggtggctcagagactagctttagggggtttgtgtagttctgcagacaggattgcaaggccagctggtatgtgcactttttgggggaaaagagtccttatttcttcatcaaattctttacagaagagtgccgtgctccccgctgtcttaggagttacagaacatttaaaagatgatttgcggacagattaaggacttcagaaggagagatgacaccagacctaggtcttgcagatgcaaactcctgtcaagtgtgagaggagggggagtattatccaccagtggcagataggctgggcatctgggcagaatgataagagctgtggccctgcagccagtccctgcatttgcaccctgagtttgccatgagctgtgtgaccttagtcaagtttctcaacctctctgtgcctcagcttccttctctgaaaaatggggatcgtgttttgcacacagcccgacacacagcaaatattcagtgactgctgccgctttctgccatggctaaaggtggtgttgtggttttccttccaggtttttatgctttaatttcctaactgttcctgcattacttcacagttgatgacgtgtggggccaagctcttggcacacgtgagcacagtggatattcaaggagcgttaactcgggtccatttttctttccatcaaacacagcctcctggtaaaagagccattcaggatgcctggaggagcccagatttcaaatctgatgaagtctgcagttctataaattccctccctcttttgtgctgatggcaacgacttttatatgtattttcatgtctttctctccagagataaattttgtggcctgccactgaatctgcttcctaaaatgtagcttggagattttatttgagataaactatcatgtgaataaatatagatactatattttaatctgggagcgttccatttggaacctttttttttttttaaagtcaacattagtggtgccgtcattcaaaggatatggacgtttgggggaaatttacatccaactgtgactgagaaccttttgccaggataatatctgtttctctgaaaatgacaatggctatggacgtaaagcatgatctcagatggcagtcccgaaatcaggaaggtccatttcaacacatctcctggcccctgtggcaagctacaatgctggtatgctcgcatggtagggtctctgccttgcaggtaacacgtgtccatctgagaatagtaaaggaggttcatttgtttatgtgctggtggtgctgaggagtttcacagaggctggaaaacaggggctggcaattgattccccccagagccctccgtttcacattgccccaccccagagaccatgggagatgatcatgggagaggaaggtaaacatgcatcagtggagcgggagagtgaaggggtgaagaaacaggaaactgcgatcactgtgggacgttgcccttttttcatgaccacgaagatgcaaaatgctgagccttgttatttctggcccaggtaggaattggtgcttccatttaattagcgtatcatagaatcagattattgaccatgggttgggtccacaccaaaacccctgagcgcctgagcccgggggagccctaagctctccttgtccgagagtcgtgagggaggcaccctaggagcccctgcaggattctaggggccaattgatctcatagcttttagggagaaaatgcccctaacaatactttctttctcatctgtgcaatatgcaataaattcatctacccacaaactgaaacgtgaacaactgcttaagtatcacaaagcagtccatgatacaccaaaaaagatgctgttccaggaaagtaacaaaattgcctgttctccacgcctcaccccgtttatggactttcagttctccacggtaatagagtgggaggtgatgaacaaagcgagacctcaccagaggctgtgtgatttgtggaaactttgaataactctttttatcccaggccccttctagtgaaagtccattttatgatttgtacaaaccaacattgtttttgcgggagggcatgtcaacaccccgaatggctgaaactgacccagaagtcaaattagctggaattgaatctataaaatggattcatttgcacctcattagaacataaaagcaaatccaagttcacatggggaggtgggggagggcaaagcggtactaatagaagaaaagatgttggctgaaaacatgttttgaaaacaaggtgttaaatgataaaatatggcaaaaaaagcaaatggagaatccacaaacacatatgggttaactctactccagcacactgggcctgtgagaaacagattgagcttgcaccttcaaggccgttgtgatcaatgggagagcagacatgcaaacaatggaaggtaagggggctggtgtcacctgaggatgaggagaaggctaagcagaggcaggagagagcctctctgattagagaggcagagatggaatccgagagtctggcatcaaggggagcctagagcatgaacatgatgctgttcagctgtgtctgtgttcacagaggcactgagacgggtaccagggtgtagatgccaaggacggagaacatttgaagaaggcatggacagttggcagaggcaactgaggtgctaagtgggagcagatgggaggggcactggggatggaggagcaccttggggctctgagagactggctttgagggcactagccctgaagcctgttctgtgggttataatccaagccaagtggtatctcctttaaaaaaggtggccagatttctgatggcatctcttcaaggtatacatccatggcagggatgagtcagcacccagccttgctggacatggaatcaggccacagagcctggtcacgtagtgccatgtaagtttcagtgggaagcctctcttacagtatacctgggcatttcctgtgtctcctccctgaaatgttttctgaacaacttctgaaatgtcagtgtttctctaaaagaaagtgaggaacctctgtaaaacaccttctttttcttttgaaatgggatctcactctgtctcccaggctagagagcagtgactccataacagctcactatagatagcctcaacctccagggctcaagcaatcctcccacctcaccctctggactagctgggactacaggcatgtgctaccaggcctggctaaatttttttcttttttttatagagacaggggtctccctatgttgcccaggctggccttcaactcctgagctcaagcaatcctcccaccttggcctcccaaactactgggcttacaggcataagccactgtgattcttaaaccctgcccatctctgcctactcctctccccagaccacagctctctaggactaactcctatttaggaagcatagagaaaagtctgacaattaaaagtgttttgtttgttgggtgatgaatttccagggcctccatctactgtgtagcacttaatcgttacttttcgtaatattgtgactaaccttcctggccatgagaaccaggctgtctctctttgatgtacggtgaggatgctggagttgttttgctagggctgaaaatcctgtgtgcctctagatgttagatttcccttggaaaaaggctgtatggggccagtacaaagagaattgtttatgcttctgtgaggagatgccaaaaaatatataagaacaacaacaacaaaaaatccgccatcaaatttactccttaagtttactgacagcctgtcacaatgaaataaaacatttatattcactttatggacttaatttaaaatgacttagttgaagaaagcagccccttgctttgaactacctgcaatccgaacacgaaactcgtcatgagaatgtggaaggaggttgccggacgctgctggctgccttccagcgtccacttccctttctctctctcctgacacagctccgtcgtgtgtttggtccccaggcctgaggtctctgtgctgccggggaagctgaccatgctagttccaatggtggccttggtttagaaaatgcaaaaaagatctctgcaggtcaaacagcgataaggaaaggttagcagtgagaattcatcagacaagaaggtgcctgagttttggcacaaggtcacgttcactctctgcttttgactgtgctgcttgtttaggcacagagatgctgtggctgagtgtcttgctggtggaggctgcacatgcagccctgtgggaggtggagccggtacgggcagatgatgtcagatgtgaagcgtgcccacctgctggacttccaggaggactaggcagataactgccctggtgtttcaggcactttgagctgggggttccgttgtttgtcgatgagagagtccctggatgccaagagctttagagcatcttatcactcacgttggagttgggaccaaagcgattcaaaggaggccacagtcagctgttctcagcatctgaagcccatgacttgcatcttttccagaggcagcatcccaggctgtgacggccagccaggcatccccggcattctccccgtcctgcccaggagaaagggccctgtgactgcatgacactccctcttccatcatccatgttgcagcccctccaagctggttaatggagaaaaggaatttcagaggcttaggggcttgctgctttgccagcatttctgaaaggcttcagagcaactttaaggatttttacaacaatggcagtgcttatttgaatgatcttgtacttttaccaacacagtgcaaagccctccacatgcatcccagcaccctagttaagacagccctgtgatgtgggcccctgagctctccctgctgcacgaatgaggaaacgtgcccgagagggtcctggcctaaggggcagcctctggactcgcacccaggtactcctcctgtgctcctcaggtgctgtcatggcagctgctctgaggtctcagcactgcctgccccagcatggccgagttgggcagaagtgctggagcggaggtttgccttctgtatggctgcctcagccagacccacgcatgactctggaagattgtgtggcgctcctgtgctgtgcaccgtggtgtcttcaatgtcaccagcaatctgaaatgatattcatattttctaaggtcagcagggcacagcacacccaggaagcatctgatactttggaagaaatctggtttgatgattattagaattgcaagagtagctgtcttttagtaagtttccccctactcccatcagcaaagtgataagcactttccttcatcatcttacttcttcctctcatcaatgctatacagcaggaatcagtgtctccatatcccaggggaaaaaacgaaaggtcagagaggttatgttcaagattacacaacttgaatattgtaagctcaagattcaaacccagatctctctgaacgtcagaaaagcctggactctttaccattactgtatttatttagacaaatacagttgtatgtattgatagtggacaaagtatttccatctatgcataacattgtgggatgagcaaaccaaggtgattgacatgggcattactttacatatatatctttgtgtgtgggtgtctagtgagaacacttacctactctcttagcaattttcaagtatccaatacattgttattcaccataatgactatgttgtgggataactccctgagcttctctgcgcccacccccctatctaaatgacattttgggtcctttcaaatcacccttatttctctcccccagctctagacctacaatctgctcacattggtgaagtgaaagcacctgcaggattgaatttacccagtaggttaggaccctgcatgctcacggaaccgccctacccatcctgcctccccacctggctctgcctcctaaatggatagatacatgctgttctaaagttggccaagctctatagtctccttgggaaaataacaaccttagaacatgggacagccctgtactcacaaattgatgtcatagcctaagacaaccaaggcaacagaggattctcaagaaggtagtggaggggacaaataacttctacctcaggagatcaaaacgtgaagccactggtcactattctgctggcttacactgatgtttactcaccatgacatattaatgaaaggcttttaatgtcagtcatttcaatcacaaatccttacaaaataagcaaagtgttactcttgctccatgaacaggatacagagattcctgctaaaatcaccccaagctcaaccctgacctcacctgctttaattatgcgtgaagtaagtcaaattcctttgcaacaagcaggcattcattatctataattcctattttataacttttttgtttgatctatcccagaattcattctgaagaaattcaacagaataaatgatcattttccctgaccacttgactgctgctttgaatatgtaatgtggctacacatgtatattatttatgaaaaattgattgctgtaacatctcaatattcctttcatgccctgtgaatgtggacttaatacatttcctctgaaacccacgactggcctgcagtacgtgacaatgccttggagaggcgaatggatttattggtttgggcagcctgtcgtctgtgcggaaattagggaattcctgcgcacagtcggctctcgcctgcacgtcaggagcttcagctggcatggggcgtgatgactgtgctggcccatagggcagtccccagtaaatttggaggacaatatagaccagcatcccagcgtttctctaaggaccatggtctaaaaaccacgccccgtgagggagacccgggatgcagggatgcacactttctccagctcccagtctgacttgagccctgcggggtaagtatcggattcctccagacgcagatcttgaaacgactgggacggacccaagttgtttctttaggaggcaattccaggcagaagtgggagaggcgtgtggaaatgagacaaggaggccgcaggggccatggggagataccactgggtgctctgggaccagatcctccctgcagaggaaggatcccatgtgtgaggccccgtgtacatcttccgcctcccaagtgtcattgcacgggcacgcacagagcccagggtccctctgcattccctgccgtgatggtggggtgggaggaagccctaggggctgggagtcccggagacccatagaggacagaaaaggacatgaactggaccagtgaatactgcggggacagcgtctgcagctgggaggcgttcctgagagtttacaagtccatcaccgccccgtccctcacggcacacccagagcctgggagtcaagccagagtggctgtgcaaagccatgcctgcaatcactgtcgctgtttctctggaatccagatgaaaatgatctacaggcagggatgagacttggggcaggagaatggtttgaggacacaaagctctggtgtcctggtgaacaacaagatctggtcaactgctttgcctacaagaaccttctgaagagcaattctggtgttggatgtatgagagattgatgaattgtgaataagatgcacagcaggtaaaacaaaacgaaaacagccacaagggagctgtccccgcacctccaccacaatggcaggggcagcagcgaacccagcaaggatcccctgcctgcagtggctgctcagagacttgcggctgcctctgtctgaaggtctggctactggaggagttctaggatggggaggggggcccaggatcaggtcgagcattcctcactgctggaccaggcatgaggtagctcacacttctgcagcctggaaaaagagtggatttgggctgcgcacatccctggtgcccaaagcgtggccagaaagacagcccctgtatcacctgggagcctgttagaaatcagtctctggttgagccccggatcggatgactggaaatgtatatgttaataaggtccccaggtgcttcatgctcacatgacagtttgagagacagggcactggctacagcttctggcccagctctgcgtctttggggactgagtcaagaggagcccgcatgggcttggagtttcccatgggcctgacacggccttgtttcatttcattcactaaatgacggtgcttggcaggagcaccaccgtccacctcttacagatgagctcagagctgcctcatgatgtgctcagatgcgttctgcagcagtcggtgtggacatggggcagctgcctctgcagtgcacccaactcacaccagactctcctgccctcgatcccatgggaggtccaaatggccccgtccaaagagtgaccccaggccacagagcagcccaatcttgtccaatttggatgattctaggaagatttccaaacaagaaaaaaaaatgtttcgaacccaaactgaaggagatggcaaaagacacaaagtaatgaagtgggagccaaaatggttttcttttcctccactgaatatttttcatgtggtatcggatgttctttaaaggtcaaatgttactattgctcatttcctcctcagctaatcaagtattacgcagtggcttaaggtcacaagcgtgagttactgatgaaaataaaagcctgttcttgattttgtaagggaaacacatgatttgagtacacgcctgtagaaactactttatgttcagggcaagcatgttccgcacgtatttgaatttgggcagatgatgttatctcaggtcaaggattttgagtgcaatctctgaacactatgtacaagggccaccctcaccagtgccaatctaggggggatggtattgataggaaaggcagtcgtttgcatcctgaccaaggcagacactgagttatgcaaaaggaccaataagttgcctcagttttccctcctgtacaatggggattatgagctgcctgccagcaccggagtgaggggtaagtgggataggatggggcaaagtgcctgccacatgttttcccagactgagttcaataaaatagtagattagaaaaaaaaagactggaataagtacccataattgtgagcctccttcatgctaggggcatggtaaaacttctctaatgaaaccctcacagtcaccaacatggaggaggctgtattcccaatttaacaggagagaaaactgctgatcagagaggttgagggacttacataggattgcagagctgctgagtcccagcctttcctggcctgacatcatcctgtagtgggagtctccccaaggtcctaaagcattgacagcctcacccctggctcaccccatggtggtggctgtatgaggagaaatagcctctgcgtcttagtacctgtcccaaagggaggtttcctgtgctgagctaatggagcaaggccaccatagcttggaggactgaattaaaaccccaagtggggtctgctgggtgctggtcaaatgatggggaaggggagctctaggtacaggattccccttttgcccaaaactcaccaccttccatttccattcaccatcataggatttctttggacataagagagaacccactccaagtagtttaaccaaaaaggggaggggaagcattcagaaaactctcaggggacccagtttcagagagcagagccacatcccttgggagctgggagcaggagaggaagcaggtgtgggggtgggcaggggcaagcagggagggccaaggtggctcttctgtcaatgttgcttcacccagtacgggctcctcgctccctctccccctcccctccccctccccactctcctgtctccctttctactgcaggtggtgaaggtggcacagcgttcatccatacagttagcaaaggtggggaactgggggctgggaaggaacattccacctgagggaggggcgaagaaaggaggacaggggaaggatttgcaagatatggtggtctatggattagattctagcaagagggatttcaggaataaatgatgtaagaactcaatgagaaaatacgcttgggtaaggcagagccttggagggagttgggaactggggagccaggaatgaatgccagttatggggatggggcttctcccaggggtgcctcatccaccctccttcctttcatggccaccctcctctgctcatctaaggatgggcagattgcacttttccatgttaggcaacacgctgtgcaaatacagctttaagctgctttccaacgaggctctgcagaaaggcgtcccctgagaaaggcgaagccatcaggagagctgagggctggaggctgctcagcactgctgttttcgcccctggccagggctccccctccaagccctgcatcatctctctgctctgtccagagacacacctccaggggttgctcttgtttcctccccttttctttggaattctcttaaatcaggcctgtgtccccctcagccctcggtcccaggcacgagtagctcctgggatttccacattcccagatccaggaatcaatgcatcctcatcttctcatgtccttgcagcactggatgggggtcagctcccaccttctccctgaagtgttttctcactgggtttctggaacattctgccattgcttttctcccatctcccaggagcttgcagaggtgtggtccttgggcctctttcctcccccaggtacccctgctagatgacctcatctgcgtcagggattcctatttcattacagggacctcctccctggtctcccaaggggcatttctggccacctctttggcaactgcgttggagaggataacaggcttctccctaaagggcacttctagccttgccccagccagcacttccagcattgcctttcttccgggtgctcagatcaaaactttcaagcgtcttttcttccaagcttggcttctctgttaggaagtctcgccagctctgtcttccaaccaggggcacttccagcacctccaccaccgtcgccaggggccgagccaccatgctgttatctgaaggactacgtggcccacccaactgggccccctgcttctgggcttcttctcctgcaggagcacagtgaacctgtagccttgattccacttaatcaaagctcaacggcctcccgtccgtttgactggaagtgtctgctcagtggctgacaaggctccgaccttacctcctcccctcagccacaggaagagccacatcgcctgcccttcctgctgtctcctgaatgtgtcaggccagctctgacccagaacatctgcagctccctctgccctcttcgggagtgctcttcagaaaagtctgcacggcttactgcccgcctccttcctgccttcccccaagggggtcttcctctccaggagactctgagcaatgcatgtaaaattgtggcacccgtcttgtctactcatcatccacgacgtattctccctgcgacacgtgtgctcatctaaggatgtgctaatgatttattcatgtatttgtttacttgtgcattcatttattatctgtcttccatcaccagaatacaggtgttatgagggcaggacttttgtacttgttgtcctcttttgtacttgttgtttatttgttgcatgactaaataaaagcagccctggcagagagaatgtggatgatgccaatgtgacaagcctaatgttctttgtttcaggagttcttttgatgtggagaaatagagatatgttctcataatttgaggttttttggtcatatgattgtcttttctgtaaaaatgggagttgtcagaataaacagagaggcagactgattttcccagggggagtaggaactcctgccggtcatgggagatccagcagaggcagctgggggtggggctgtggctgagagtccagaggaggcagtggggcccatctcgtgccaggtctctcaccttccaggtgaaagtcaatcatggctggaagcttgcccagtgccctttgtgtctagtttttctccataagttactggggtacaggtggcgtttggttacatgagtcagttctttagcggtgatttgtgagatgttggtgcacccatcacccgagcaaacattgcaccatatttaagcctcctggccttggtgtctatttttattgaaacggttggactcccgcttttggctcctggatgcactggttaccataagaagctctctcccggacgtgcctctgacttgttaaatcagtggactgccggatgtagcgggagctctttcaagctatctgcatgtgagggctggcttgggttgagataatgaccactcataatgaccccagtctgggccgattacggattcgatcttccccttgataagcagggttgtcagtgcgtcactgaggccagcacatgctcatcagggaagcctggccttggctgagaactagtgctggggaagggaagtgtttagggcttatggcttgaaaggagagacagctaatatgtcagtacagggcctgttgtctgtcactgtggctccataggccggggaacctgcagaggaggccgggtctctcccacctcctcccatcactctcactcactcagttctggtcccatcacactgacctattgccagtttctggtgttgagccgccctggtctctatcctggagggcctcaaggtgtgacatccccagctaacgggctcttccctgacccttgccggaccccacctggcctcactgacctgtctcaggtcttggctttaattccatggcccaagctctctgaagcagccttcccttgcaattctctgtcaccacaccttgcttatttctcttgaagcgctaattatgaggcttatgaagatgtcgcatgtctgcctgattgccctgggcggtctgcatccagatggccaaggcagggttggccggttcttcattagctatgcggtgaccacacagggcagggcctgggaggctctcaaccagtgctgctggatggagggtaagcacaggctcagaggaggccagtgcatggttttgcccaagaatctgagaagggaaacacgtggcggagaaggggaagagtctagatccccgctgatgtctgtctggctctgggaagagtctagattcccaccatctgtctggctctggaagctgcactctcggagcgaagccccaaagcctcccgaccactcaagggagtgagggctggagggactttgggggctgaacggtccaggttctgactggcggctgctccgtgagcgtactgttcttgggaaagctcatcccactggacgaggatgacacctgttctcttctgcatggctgttctgcatcaaaagagagtgaaaacccactgctggcacctctaagtgtcaaatgctgtgctagacactagggtgagggtgaagacacagaacccgagagctgccccacaccaagacatagacatagggtctgcagggcttataatacactaagggccggtggtttcaacccagggcagcaggtgcagtgagggtaggtgtattagggtgctttagagggacaaaactaacagaataaatgtatatatcaaggggagtttattagggagacttgattcatatgatcacaaggtgaaatctcacaacaggccgtctgcaagttcaggggaaggaagccatttcaagtcccaaaacctcaaaactaagaaagtcaacagtgcagccttcagtctgaggccaaaggcctgagagtccctagcaaactactggtgtaagtccaagagttcaaaagctgaagaacttggagtccgatgttcaagggtaggaagcatccagcatgggagaaagatggaggccagaagactcagccagtctagtccttccacgttcttctacctgctttatcctagctgtgctggcagctgattagatggtgcccaccacattgacagtgggtctgcctttcccagtccactgactccaatgttaatctcctttggcaacacccccacagacacacccaggagcagtacttttgtatccttcaatcccatcaagttgacactcagtattaaccatcatcccggaatacgtggaggagcctgaggtcagaggagagagggaagcgctcctggaactggcaacttcagcaacctaagtcttaaaggcagtgaggctggaagggaaggaagtggcctgtgggggttagctcctgcagattcaggtagtttgtgtccagtcacctaacttcatgtcacatgaagagaaaacaaaagactctacctggcacatgaggtcagttggtggctttattagtcagggttctctagagggacagatctaataggatagacgtatataggaaagggagtttattaaggagaactcacaacatcacaaagttaagttccacgataggctgtctgtaggttgaggagcaaagaagccaattgtggctcgttccaagtcccaaaacctcaaaagtagggagccaacagtgcagccttcagtctgtggctgaaagcctgaaagcccctgggaaaccactggtgtaagcccaagagtccaaatgcagaagaacttggagtctgatgtttgggcgcaggaagcatccagctcgggagaaagatgaaggctggatgactcagcaagtcagtttcttccacctccttctgcctgctttattctagccaccctggcagctgattgggtggtgcccacccacattgagggtaggtctgcctctccctgtccactgactcaaatgttaatctcctttggcaacaccctcacagatacacccgggaacaatactctgtatccttcaatcaagttgacacttaagcatcacagtggccaagagtagcataggggacccgaccctcatggtgcttgcagagggacatgttggattcaacaaaggagatgttgcatcctctcctctccaggagttggccctttggttctgagaagtgagtggacacagatgtgacatggaaaggtgctatggtggcactgtttggtggttgcaagggatgcttctgagacagctgcctgcctctgactctcccttatcccccctgagtctcagctatctcatccgtgaaatgggcatttgcaggtgctgttgtgagcactgaatgtggtagcagatggaacttagtaagagcttgatgaactcaggccactgctaccagagtagcaaatggacagaaccagggcagctgccctgaggcccagctgggtgccaaggcaacaggatggacagggagacagcaaagctctaagctgtactcagggagagcaatgcctgcagggtccatcagagggggcttcctggggagggtcctgcagtcagcagcgttcctggagggagcacggggcaggggcggggatcatacgatgggagggtgaacacacctaaagggctgggttagagagtccgcagcaatgggtaaaggagcagaaggtggagataccagggtcaggccagatcagcgagggccctggagttcagagacagagttggaaggaggggagcagaggactgtctggatggaaacaggtttggaaatattctggaagcctggggtggagagaagaaattttaaccagctgagcccggaagcatctctgcagttgctgacaatcagctcctagtctctcatcacagccccatctcaagatcagtgtgccctttgaaaagatggctgcacatcaccaagtcagcaaagccgagggccacctcccacatgtgctcttcaccctcttggtgacgcttctgactactacacttttcattcactttgatgcattcctcattcaaggggatgcaggagccatgatggtgcccatccccttggtttcagatttattttgttattgttgttgattttggcctttgttatgctcatggaattctggtattgtaatcattttaggtaagaccgatattttgagtttttccatttgtttgttgcagtggctttgcattttaaaatgtgggcatgttccccaggctgcccaacatcaaatgtgaaacatcaaatgtgttttttggccccagtgggaggccctgacctttcatttgcatgcatcataaatgtatgtatgcatcataaatgtatgcatgcgcacgttattttgtgcacatatgatatcaaaacccccatcttagagccccgggcatttatgtagactctaacaatagccatatgcttccccctcccctatctgctgtaaaccagtcaaagccacagagaaaatgaatgcacagacctctctgctcacggtgcatggacacacatcacccttcctgttggtatctagggtcacagagaagtcgcaattcattagttatcaatattgtgttcaattgacttcttgggaaatatgacaggcacccttcttcccctccagctgcagccagggctggtgctgatcgtgggtctggagctgtctgctccccttggaaatcacagtctgtaatgactggttaacatattgactgccccaagaagccctggagtcatctcttgcaaaaggccagcctgaagccagtgtataatgactgcttctccaagataattaggtactttccttcaattaaaattggaaaatgcacagagcagaacattagtcacagttaccatccggtgagatgcatcttcagagcaataattgctccccaaaggtgggagggctgatgtggggcctattgacaatgctggtctgatgtggttgtttctctgaaaactgagaaggagcgctctttctcaccctgggtgaactaattttggcaccaagaggtcacaggaccttgcagggccttggggagatgagtgcagcctccctagacactaatcaacaccccacactgtctgcaccaccagagccggggtcttcgacatccgtatctgatcagcagctgactcttgccttctgaacatgcccgacaaacatctcattattcaaacagatgtttctgtgtgttttggattgctattccagtgggaatctggctctctcatttacaaaaggaaaactgtcctttagtttttgcaagatgttaggtttcccaaatacccagattactgttggagaggctgatggctcagagaagcaattaggaagaaaaacgatcattctgcactcactaagcattcccaggatggacctctggtcctatgtctctgattcttgaatactcagaatctggacagccctatgctggaagattctctccacacaggaagctggttagggaccctgctgttcccagcctgcagggtgcaagacctaatgtctatcctattgttgccaaacatactttattcattcccacaacactcaatatttttccctctgattgtgtaactagttgatgctcattagtttaaaaattgcacaacatataaaaacaaagcaaaaacctcctgagtccccaataccctaatataacccctgccaaactttttggtgactgtatttttttcatgcaaatctttcaacatatcacactcacacattatttctatgtattaattaatactttcctccatctttgtttgagtgtgaaacagcatatttcatttaggaatccctccaagtcaatcaagtatagataaaatgttcaaaatattgttgcatactaatttttctgtgaatatagtttagcgacttttggccctttgatggacatttgcttcatgtccagttttttttttttttttttttttttggccaggcaatgatgccataatatatttttgtgtatatgtatccttatgtacccgttcattcttcacatacccaaagactacaggctcctatgcactgataagaaaggctgacgtttctttgcagcttatttcatgatggatacaccaccagagaaaggaggctatttgcaattccattgtcatcttgtcctgcaaggaattttgccccaattgcaccagggagcttctctggttctcagagctcagtgagttcttgcagacactcgagatcctggatcattctagtggatgtttgaggctttcagctgccatctcgtttactctgtgtgtgcctctcaatatcaaccctcccactagctgtttgcgggggaaccccaggaatgagtagctgatggatccattggagaataggccatagaagccctccagatccctcctggatgccgggcctcaatttacttctgatagtaattatctcctggaccatgactctcagatggctagacctctatgggaaacacattccaggctaaggagaggagtattcctgttttcaggcattcacatggtcagtgggcggaatgggggtagaaattgtgggcccttgtttcagatggtagaactaagagttccagaggaaattgtggaaagtagttttcaattggttagaatggaaacttgcctgtctccactgtcgcagaaagaattctaagtagaggattctgattttagagcagaggcaggagggctaaattctctggggtttgtggggaggtgaaatttaggtgtgattgtaacagccagaacaggtcttaggtccagcagaattaaatccttagatatgatctatgtagcagcagtcaggactgcaagaactagattttaaatggggatctggttagactctagacagcttgataggcaagaagtcaggttctgagccagagtcctgggaaattctaagagcatcttacgtctcagcaagtccaggcatccccatgacttccacatatctcggattccaggactctcatctttgcatccttatggtagattgtttctcccctgtggtcccaataaacctcaaatctgggaggattgctttaaaggggtcacgggagaggacagcccaggctttgacaagcacattcgttcacataagggcaatggacaacttcaagtttgggtagaaaatgctgaaaatgacaaagttttgtcaggaatgctgtttttgactttaagatgcctgaaaggcatttaaacactaaactcccatgtagctttcccgtggatgatatataactccatttacagctataatctgggtaacaaaatgaatactccatcattgtactatgaatagtaaattaacccagataaaagtgttctacatccaatcaaaaccattaaggaactaggagactaagattggtgaggacattttggaggcaattataactaatgaatacattaacttcaagaaggaggatggtttcagtggctttctggtctctccaaataaaattagggtaggtgggaacaaagctgaaataattttgagaaaaggacagatttattgatctacacagagccattagaaggggaaatggtttcttaggagagagacttgggcatattagtcttcagaataatcattaaaaagaatgaaagacattttcccttcttaccacatttacaacccgtctagcttagaccaaaagagctcacactttgtcccctattcagggattttggtgtggaaatttttcactttcttttaagatatactatttattgtgttttaaaagtgaaattaatgcatactaattgtgggctgtatggaaaacacaaaaaatgcaaaaataaaaacaatctatagtcttatcacccagagatgaccattattaacattttggggtaaccagtcttttatttttctatattcgtatatgtttggggatatttatagatgattctctatactcaagaataatggctttaatatttttataaaaatgataactcatcctataaaattcaagtcatatagaaaaattcaaaggaagatactaaaaatcatcatctgaactctcacccacagtagttaatcatgcccactttcagcatctctctctagcatatgtgcagataagggagaaagagatcaattaccttctacagaaaaacgatgattctgtgcatgcttttttttttttttttttttttgagacggagtcttgctctgtcgcccaggctggagtgcaatggcatgatctcggctcactgcaacctccgcctcccgggttcaaacgattctcctgcctcagcctcccagtaatctaggattacaggaatgtgccaccatgcccggctaattttgtatttttagtggagagggggtttcactgtgttggccaggccggtcttgaactgctgacctcagatgatccgcctgcctcggcctcccaaagtgctgggattacaggcgtgagtcaccgcgcccagccatgctattttagtgaaaaaaatattttgctatttaaaacaggcaaatcagcaaaaataaaataggggctgctgtataacccgcaactgtctccggaggccatgttggtcttggaggtcttggctgttcttacactttgttttcacttctttgccttgagacatccctgagtttttgtcattcaagacagcaatgcacctcttagtaaggctcttaagtcacagctggctgctgtcatagcactgacttccttttccacactaggagccaatttctttagcctggaggctcaagccccagcaccacagaggccaaaaagggggcctcggtgatcttctaccatcttctactgtggcaccaagttgctagaggggcattcctagcttcctgctactgactcacacctgcagattcaaaggagagatgtccagacacaaacagaacaaacaacacttccaagagctaagtagtaatgcaaatgaattaaatggggcatgtatactgaaagcaaacaagcaaataaacatgagcatgaaaattacattcaaaatgatggtcaaaactccccaggctgctggtgtcatgcaggagttgtggtccagtgtgggcatatcctcaaatttttcaaaaggagccagagatctaaaggatttaaagattttgtttttgttgtttttttgagatagagtctcactctgtcacccaagctagagtgcagtggcgtgatctcagctcactgcaacctcggcctcccaggttcaagtgattcagtgattctcctgcgtcagcctcctgagtaggtggggttacaggcacagcccaccatgcccagctcattttagcatttttagtagagatggggtttcactacattggccaggctggtcttgaattcctgacctcaagtgatccgcccaccccagcctcccaaagttctgggattacaggcgagagccacggtgcccagcctaaatttttaagtgaaatctccttatttatgtcggttgacagtcaactaaataactaaaaacactataaaacaaagcccattgttaatcagtccaatttcttcctttgctataaacacaatttaataaagtacagagaccagttaaatgtaaatatcaaatgatcaatgaatactttttgtgtaagtatatctcatgcaatagttggtacattcttatacgaaaaatacttattgtttatctggaatttaaatgtcaccaggcatcttgaatctttcctggctggcctgggtgaggaggctctccaatctgtcctcgctgctctcaggaaatctaggggcttgggggaggtatgttaccatccactgtctgcctgttcctgtccagttttcaaactactcagcgggtgtcttgttggtgttttgtccatttcctttttcattgatgatgtagcttcttttcccccttgctattgtttcttattttatttttgttctctgtaggtttcaagaaaatagtgggataaaaatgcatttttttaaccatcttgagggatagtctgataatctgctttttaatttaactttgtataattttttcaaccttaaatatttttaaaacatatttttcttggctgcctataggcccttttgtgaatttaccaaaattatcttagctgaatcttaattatatttcatgcgcagaaatcctgtgtacaaatatttgagctaaaaaaagaatttaattgaagtaataattcattattctctttggtcagtgcctgggccaggagaaaagggaaagaacgatccacagaagggttatctctgactattcttaggaaactctaaagaatttcccagggctttgaggcagcttaccccaaaaccctggtccttggctttcaggcagctcaccctgaaaccctggtccttggcttttcaggatgccagtgggctccattatgtttaccttatacacactggtaacagatttatctttctcttccacatcatctgggaatcccttcctattagttggcttctaatgagctttgtaatcattcattttatctcaaggcaaacactattaaccaggtttggtgtgattaagaaaagtgcttcttcaagcgctcattttttctggtggggatgattctcaggtaattaaaccacatcgtgaagaaacaacttgatacatcggcttattttgcttttgacaacatgattaaaagtactaggctttccatcacaatttgctgcaaagaatgttgacattccacttgataccctttagaatctaaagttatgtcagacagacaaaagcaactctacgacaagtgaaggcaggtactcccgtgtcctgtctgaatagtccatttagggagtagcttgcagtgacccgggcttgtttagattataaggtcaccattgagaccacatcccacttcccaagataaccaaattccataaagaagtcaagcaacattggtgcattttaatggaataaaacactccggtgacttcattccaggctctgtgtcatgtaacacagatttggtgaaacaagtgtagcatgctttgtcacgtttgtttgcattttcattgctgctcttttaaattttgtgggtggcttcagttgccacttttctgaatttatgagctcagttatgtaggaaacatgaggcaatttgttcagcattttgggcatacttaagcaagtttttgtctttagagagggtcaaattggccttttagcctttatctagcatgagaggcatccactgggcagagctcttgcacctggccgctcggggcttgctgaccagattatagggatcatctatgtttcagcagtcagtccctagtccagtgagttctggctaggatatttaaaaagaaacaggaaggaaaggagaggagaggagaggggaggggagggaagaaggaagaaaggaaggacagagggagggatggaggaaagaagagaaggaagaaaggagagacaaagggagggaaagaataggaaaaaaaatcactggtttatgatatttaccatgcatagaaagatgactgagatgttactcaggaggtggttaagggtgtggcagatactcagaacatcatttaaactttaaagtttcattcccaagagaaatatgtagaaatatgtatgtagtagttctcccaagagaaatatgtagtagttctaaaacgctaatctatccaattacgatttgtacctaagatacctctcaatatctgaagacatcaagacaaaaagacagctacatttctagcgcctcatggggggaaattcaatataaagaagaagaaaaaagtaaagaatagtctcttctctcctgtgcattacaagcccatatggccccccaaaaatgtcaccctagagtctttcttgctagctggagcacagcttgattttcagagatgattgagttggcatggctgttgccaaaagcttgttttgacttgtaaacgtacaagtttgggataaaactcagtgatagaggagaaaaagagaatgctaagttatcatttttacaattgcactttagaacctgtagctgtgattggtggcagtgttttcccccttaattcttttgccagtgtgttttctattatttttgccaacctcttgtttccaaaccacttgcccagtatgctgtctctattcaagtaattgcaggattcactgttggaaaatggaagattgtttcagctcccacagatatgtatctcatgagatttaagattgtctttcctttgcttattctttcctttcttgagtcaaatgatgcaacattctcagcaatagcagacaacagtacaaaatgaaaaaaatacatatgaaatatgtttattttatataaattaatatttatatctcattccacttacaaaataattttctttagtctcacaacattttctctctttcgtcaaagtactttcttctactttagctgctaagtcacttaggtctaaatcgacacagattacacctgcttgaaatctctggtggggttgaaattgccagataattagaagaccagattaggaaccgagtgcaacctggtcaacgttgagaaaacttaccaaatctttattaagttgagaagggggaacacagccatttgtttttccggatgacatcactttttattaccaagggtatgttacttggattgttttctacaagtgttaccatcgaccactttgcagtgccatttatgctggcaactctcaaatttgtctttagcatttctaagattgattcccccatcttctattaaaaacaaacatctattgaaaaaatgtcctatagaaatgtaggaaattgattccagctcttgaactgggctgactgtacttcgatccgtgtgatagaaatgttccagggacattcataaactgttgaatttcacacacagaaaaattgcatagagcgtgttcttcctagttgtagcagtaacagcctttcgagtcccccattctatatctcttttcttgacccatctttgttttatctccctgcctcctgtatcaaattaccttggaggctttgaagtcacagaaaatcaaaagttaggaagagatgcatacacaccttaggctattgctcagtgacttaggcataagccccctaatgcccattttatgagtggcttaaaccacgttcaaatataggtcagaaaattattgaggctttatttactctctcttttcagggctgctggctgacatacacccccttctgctgaaaggtgttaaagaaatatgcccagagcatagtaggccctcattgcattctcattgacttgatgtcagagaaaaaaaaaattagcattttcaaaatttgctgttgaaaatttgagacccaaaaaagtgtatatagatcaagttgttgttttacagagcaatggtgaggggagggcagaatgctgtaagcatcaaaccacatgcggtcaattcatctataatgatggttaccaatttttacggacttccttctgcctccacaggcactgcttcatgtgatatgcacaaaactctgtgagttgttcactttcccttcccctcgttcattcatccatccaacaaatatttactgagcatctgctatgtgcccatgcgtgggaacagcacattgatggagacaaactgacccacggccacacggagcattatcttggctcaaagagctgcaggctgtgatcttaggcctcttccagctccctgttggtggttatatgatccgcaagctaagaatggtttttacattttttgatggttgaagaaagatcaaagaagaaccctgtttggtgataggtgaaaaatacatgaaattcaaatttcagtgtccataagtaaaggatttattggtgtcctagccccatccatttgttgacgtattgtgtgtggctgttttgtaatacaaggacagtctaagtgggtgacagagattctatggccctgaccctgtacagaaaaaaagttcccgacaccagtcttagggatgaaaaaaccaaggtgaactagctttccttagatgctctctgactccaaaaccattgtctatataacacactacaccatcaccattgctctcaccgtgaaacctgactgttcacagggctttttatttaaccaggttaaacagaaaattaaactggttcttatggacattgccagtctacatggggaagcaccttttcagattacatggccctttgacattaaaactatgataattctttgaaaattttcaacgaccagtggcatagaatggatggtaatgcaccgaggttatggggatggggatgggacgaggttatggggatggggatgggatgaggttatgggaatggggatgggatgaggttatgggaatggggatgggatgagttatggggatgaggatgggatgaggttatggggatggggattcactgaggttatggggatgggatgaggtgatggggatgggatgaggttatggaaatggaaatagaatgaggttatggggtgggcatgtgcagaggttatgcggatgagttgaggttatggggatggggatgagataaggttatggggatgagataaggttatggtgatggggaagtgctgaggctatgggaatggagatgtgctgaggttatgcaggtggggacaggttgaggttatagggattagtatgtgctgaggttatgaggatggtgatcaactgaggttttaggattggggatgggatgaggttatggggacagggatgcattgaggttatagggatggagatgtgctgaggttatgggaatggggatgggatgaggtgatggggatgggatgaggttatggaaatggaaatagaatgaggttatggggatgggcatgtgcagaggttatggggatgagttgaggttatggggatggggatggggatgagataaggttatggtgatggggaagtgctgaggctatgggaatggagatgtgctgaggttatgcagatggggaaaggttgaggttatagagattagtatgtcctgaggttatgaggatggtgatcaactgaggttttaggaatggggatgggatgaggttatgaggatggggatgccctgaggttatggggacagggatgcattgaggttatagggatggagatgtgctgaggttataggaatgaggatgggatgaggttacggggatgtgttatgggaatgtggaagtgctgaggttatggggatggggatgggatgaggatatagggatggtgatgccctgaggttacggggatgaggatgggatgaggttatgggtacagggatgggatgagggtatagagatgaagataggatgaggttatggggatggggatgtgctgaggttatggggacagggatgggatgagggtatggggatggtcatgtgctgaggttatgggaatgaggatgggataatgttatggggacagggataggatgaagttatggggatggggatgtgctgaggttatggggatggggataggatgaggttatggggacagggatagggtgaggttgtggggatgggggacatgctgaggttatggggatggggatgtgctgagattatggggatggggatgtgctgagattatggggatggggatgggatgatatggggacagggataggatgaggttatggggatggggatgtgctgaggttatggggatgctgatgaggaacaagatctcaactgtttcataactacaggagatgaatcctcagaaactgaattgccctacactacatgccaccactcctaattgttttccttctaagcaatatattttaccttataataaagatcaccatgattgtcatatttctttttttctatttattttctgcctgtttccttagatttcaaacaaaagatattttgttcttaagttgttaaaatacagcattgtttaaatctccaaatcccaatattccaaatatttattgttaaccataattgagcaatttcagataatattttcactggtataaagtaatctttctgcaactcacatcataaagattcttaacagatattctatccttggacaaacactgtgatattattctcaggatgaacttggtattcacactccttttcttgtccttgctaacactgagctgatctaggagacccattggttgggcgtgatgaggatttcaattcttccttggataatgctgaataacagatacttatagagacttcacctaaaatatggaaacagtttcttattttgctcttcctaacaaaaccccttttatttaggctcaaattaaattttgtcttgctaagacctaatacaatcccattaatgtcctttctaattattttctgtttatcagaattactgaatcatgacattgagtcttaatcgttttgatttctgctgcagattaatcccacctcaaacttatctgcatgtcctcacatttgtctacatctctgtctggggagttgtgtgcttaagtcattaactccaattagagtggagaatccgtggccacctgagcccaggactgtgggccatggaggcatcttcagaagctgttgatttcattttctttggggacctgcacaaggagggtactgttcctgatgtcagatcataattgttaccctgaggtcctggcaccagaaggcccgagttaaaatccatgctttccctttgactctactggtaacttcgagcaagtgcttcacctttttaaagcttcagttgcctcatctgttaaccaagatgcccacagtcgccacctcctaggttggtcctacccttcaatgcacgtgaacataagagtaatggtaccggccaagggaagcccttggatgttgttatcgtggtcaatattatttttattgtcattctcatgaatgtaaagtgacaaggtcatccttacatttcaggtctctacgttttgtcattcctccaacttagccctatctttcaatgtctttaaccaattatgttttgtccttggaaccctctggaggctgttctttattcttaggctgttcttctctgtcctctctgcctcaataactctctctgttccaaaaccatgtggaatgcaggcgctcatcaaaacttcccagggaggcttttctttctttcccttttatccaggctgaggcagacaatgaagggtatcacctcttaagactcaggcttctgcagctgctgctgggaatcccgttgccagtctaatggtcctgccttcatagaaaaatgtctttttaattcttaggtcattttaaacatgtttagggattgactttctttttaaaaggtatccggtcggatgcccatgccgtctatgctaattatgggttcccaccctttatctccggtccatctttctggaattcctattcaatgtacgttgggcctattctattttccatggcattttaatctcaacccattttccatcaccctttgtctccaggctgctttcagggtaatttctgtattattaattctcctttcagcgatttacctgctatttcatcctttgatcgactgtgtccttaattcctgtgactgcagtttcattctgtaaattctgtttggtccccttttaaatctgcccatgtgactgtcatcacactgcattcatttctcgtatctttgcttcttttatgttcttgatcatttttaattgtttagattcttttttttttttttttgagatggagtctcgctctatcgcccaggctggagtgcagtggcgtgatctcggcttactgcaagctccgcctcccgggttcactccattctcctgcctcagcctccctagtagctggggctacaggcatctgtcaccacgcctggctaattttttttttctgtatttttagtagagatggggtttcaccgtgttagccaggatggtcttgatctccagaccttgtgatcctcccgcctcggcctcccaaagtgctgggattacaggtgtgagccattgtgcccggccaattcatttttaatgtactaaatttgtgatagaattttcccattatctgcagtgcttgggttttcaccctgccgtttgtctggcctgtggacactcacttatggtggaggattccttacacattttatgatttgaattgtgaatctatgctcagtggactctcgtgtgcctggatggtaggtgtcttccccacagcaattttgtacttgtttctgtcagatgtcctagggttgtggccagctgtaggctactttttatgttaaaactttgacttgaaagtttggggatatgagagttgaattttgaaccccaaatccacgtgagattcatgtcctgatgatgaattctcaggagagatcttttatgtttctttcccaagtgaggccaggcagcaacaaataagaagctgtggtgttgcgggttgatgtgcttttctgtgttactctgaactaagggtgtgactttggagggtcctagttttatgggggtgtcagtcctacctgctctccttgctctgctctgaggggtacaaaaatgtctaagtcagtgtttttaaatgctgctgggatccccaaaccagctacataggcatcacttgtaagctgttagaaatgcaaaatctcatacccaaaccaagaccgaccgaaggaatcagaaactgggcaggtgggctgagtctagaaaaatgtgtttttaagaccccgtcagattcacatgcacctggacggccaccactccggctggtgagaccaagtctctgcacacacacctgttctttacagggcagctacagtccacctggttagccccctgaggttttaagctttttctccttttctgcacctgggaattcctcattctttccagcttgcctagtcatgcttataaagtaatgtttattatgttttatctcttttaaaataatatgcacactgactaagaaccagctgaaaattttttaaaaagaaaaaaaataacaatagtaggagtaattttggttatcttctctgccctcctgctaaaatcagaagttggtaattatataattttattgtaagtttactgccattcctaacccacagactgtcagctctgtgaaggcaggcattcatccccatttctgctcttgactaaatattcagctcctactcagtgagggaaatacagcagctactccacaaatgtttatttgtaggatgagtacctaaatgaaaaagggagacattaaactatttctgtaagaacattctatttccgttagattgttcaaaatcatacaactgcctgtattcatacttttaggggacaacccctccccagtgtggaaattttgctgtgctctttctgctcgttcatgaaacttaaaagccgtgaagcctccacaagcttctctcaccagagttgtcttttctttctgagtctacccacactgccttgaggaatcccttctgcctttgtacagtgctgtttttttttacttatcattctgtagcctggtggtaaatagcctgtagagtcaaagtgcctggttttatttcttagctgtacctcttgactacacgcatgaccttgcctttcctcctgcatttcctcatctgcacagcagggatagtaatagccccacttcatggtgtagcaggaggattcagtggatgctgtgaagctcttcgcatggtacatggcccctgacaagcacttggaagggcccgctattatttttatttcctgtgtatttcttttctttccaagcagcctagaaatttagtgtttcccaagtacacatcatattgcttggcacacacacacaaattgtagaatgaataaatgaatgaccatcatttgagataacagtaggctgtagtagatactgtgtatatagagctatacagagctgtgggtccagctctgggcccactatattcccaaacatgatgcccaatatatgcacttaataccatcatatttgaatactgctatgtaatttgcaaagtgacctcatatctatcatttcaccaaactaagatgaattacaagattacatgagtatataatctttgttaaaaatatcacatatcacaaccaagaaaaaagctcctcttgaccaccaaagccagacctggttctccttccatcctcagtagtgattgagtgagagttccttccagacctttctctatgcatccataaaacagacacacaaccgtggaagcatggagtcctttgcctgcgtgtggagcatagatgtggtcatgctgtaggactagagctgccactcagtgatgacatcttggaaatctccccatggcagtacacagaattggcttattcctggcaacaactttgcattccatagtgtggaaatccaattgaaagcacaattgttttcttgttcaaccctttgtcgggttgttgcaatatatatttattataaacaatgctgcaaagaatatccttaaaatgaagaagtgaaatttctctgattttatatatatatgtacatatttataaacacacaaatatatgtaacataaactaacatgatgtatatataaattatgtataatacatacattatgtaaattatatatacacatataaattatataccataaagaaatcacacacacagatgtatcctttctttgtacctgtgactaccatgactagatttcatttttaatcctttcgtaaatgcatctgatctttgaagtagaccctgaaatgggttaacattgtctcctgggcgtctcacagattctgatgaagaaagctttactgagcacttactacacaccatgttaagtgctagcggcttttgcatctgctgctctgtttaaagtatgtcttagggtgcaccagctcctgggctttgatacccacctaccctggggtgccaacagcatgttcatttccatccagggatgcctgggccctcttattcagggactcactgttcctgtctcactcactgactctcttccaaggcatgcactgacacccttgctctcagttcaccttacgcttcaatttattccctatttacctcctgcttaatttcattttgagaaaatagatttaaaacatcataatctacatgcatattgtgtttgcttcaagtgtttccacctaatttccaaattggcttaaagcaaaactccttctcgcggagacgactcctcctcactcaaggaattgaatttatttcctactgcgctggagagtggatctgtttaaaaaggactcccgagattgaacacacacacacacacacacacacacatacacacacacacacatacatacacacacacacacacatacacacacatatacacacatacacacacacacacatacacacacacacacacaggcatgcacaccccttcccctgtgaatacaataacatgagcagggctgtattgatccctgcagtgctttaaagaactgcctggatagctaatctataagcgactagttacttcttcactccgttcactgcagccttgtctcccacctccctcctccccatgtagtgggtgggggctgattcttctgtcatcctcttctgccctgtgctgacgcttggtgctatgtagcagcctctgtactatgcaactgctctgagtaaacaacagaacatcacccacgtttaatactcatggattaattagaaatgcctcagattcatcagtgcaaaaggaaaagaaaagaacaatgtagtcacaaattattaacagtcacttttgctactatcgtgctttctttgcattagatcatctttttttaatgtggtgtgggctgaggctgaaaaaatgcatccccatgatttctttttttcaaatcaaagagaacaacggatataaagatgcacacctccctgttagctcatctgaatgccttgtctctcaatccagaatcaaccattattacaagcttagtgtaattcttcagatatatgtagatttctctctccgctgtatttagcaataatgggagaatacgatgcttactgttttgcaacttggtttttgcagttaatccatattcagacattatttttcactggttcacatacacctatctcattttttttcacatccatataatactgcatggaatgggtgcaacttaatgtatttaaacagagtcaaattaagttgtttcaattgtcagtgaaaataatgctgtaaaacaaagcaaaacaaaaactccaccttctacatgtgtcattatttcatgtgagcatatctatagaataagttctaagagaagaaattcggggccatgagataggtgcatttttaaagtaagatttttactgaagtataacaatcatatacttttcaaatcaaagagaacaacggatataaagatgcacacctccctgttagctcagatctgaatgctttgtctctcagtccagaatcaaccattattacaagcttagtgtaattgcagttaatccatattcagatattatttttcactggttcacatacacctacctcagatccagaaaacaaagacagctaaaactccagaaggctgctggtgccccactgaggtaccatcctgtcttcgatcaccatagctgacttttccttgtttgtggatttcatgccagggaagcacagagcagacactctttgtaacattcacccaagctattgcgtgtgctgtaagtgtgtacctattcattattgtgtaggactccctaatatcaacagtatccatttatttattctacttttgatatacatttgggctgcatccatattttgtctattgccaataaaactgcgacaaacatttttgacatatttttagtgcacagaagtatgcatttctgctaagtatatccctgaaagttgaattgtttggtcatagatattcaagtattctgcttcgaaatccccaaagagattttcaaagtattgtaacatctattcacccaccagcagttcatgactgttcaagttgttccacaccctcaccaatattttgtattttctgtctttttatctttagccattttgttgagtctgcagtggcatcacattttggattgaatttgcatttctgtgacagggaatgctagcaattacctttccacacctgtgatggccatttggcctcctcgttggtgaagtggctgttcaggtcttctgtttcctgctgggacatctgttttgttttgttttgttttgtttttgttttttccttatcaatgtaggcattctctattatatactagatcaaaggctttttttggatacaggtattcaaaatatcttctcccacactgtagcttgcctttgcattgtaagatgtcttgtcaatttaagggcaactaattaatcactctttcttttgtgctcagcgccacttgtctcctgtttcagaatatttgcctaccccaaggtaatgaagatactctctgctttcttctaaaaggtttgctgtttgacatttcacatttagatctacaatccatgtggtcttgctttgtgtatggtgtctgttaagagtcaagatcccttgctcttcccctatagatgcttaaatgaccctctgccatttatccacagcagcatcatctcccctgtgtgccaccattgtcatactcctgtgatcgtgtctgtgcgggtcagcttctgcctcactgctccatctgttcacctctgctttagtgcacacctgcccccgaggaatagcctccagtagtcccgactgagagcctcttgtgcttgctatgtatctccctccttggcagaatattcttgatataattattgtctttcagccctaagggttgatgaaaaccctgttttactttatctgttctccttgtggcttttcagcccattaccctgcacagttcaagggcaaaactacagggaattgtgttcacctcttaatctcccttttcaaaaggctcttggcacctcatttcctggcagcccccatgcttcagtttttgtctccccagttcaaggagatggcagaaagtttctctggcatttccctctatggcagatcatgctgcccagcctctgccccacctgtcaccccaaccctacaccaggaacttgtggctctgctggacagcttggaaacctgtgctcacagaaggctagacttactcggaatccttgggatcctggcttctctgaatgcactggccactcaatgctttaacgcagatgcctcttggattgtttcttccatttttctttcttgttctcagtggtattgttatctgcaaccagctacacattgtaacacaaatcagaaacccagacatggacattttaaactttgataaatgtaatagtgttgttcaataaccttcaaagaggtggcccagttcatacagtataggcaccttagctacaattgtaaaaatctgatatttaactggaaatacagttaatcctaagatgaggaattggtactcttcccgctatgcctttgggcccatttataacatttaatctaccatcatgcataggaaatgcacttgcaggccacatcaaaggaacacaaataagcctttgattgtttactagaagctggccatataaagacaggtggcctgaccatcttcgtgatttcaaatctgctgcaaactctgttaatgacatttgtctcctggcttcctttgaagcatgattcctggccttagctgggaaatacgacctaaaggcttacacacagggcagcttgggaagcctggcttcagagggaagctgcggctgcttgaacaagttcaggtcaggcaagaaaggtctctgattcttttttgaggggtgggttggggagtgacttggtgcgagagggttaatcagttgaaattaaaggaatctgttaatgcgtaagtaagcaacctgcccgtagaattcagtaagtggaaagaagcttgttttagaggcagatgcttgattggggctcggtccctaaccaactgctccacatcaaaaggacgatgaatatgcccactgtcaacttctcctggtggctctatgctacacaccagggcagtctacttgtgtctgcattggcttttagcacagaagtttacaaaggatgaataaagctagaaagaagcctctggagttggtgaaagattatctacaatgaaacagaaataaaaaatctcctgggcaactcattgtaatccagctggatccttccctcctatcccttctaaaaggatatattctcttggcttccatttctgtgccaatattcctcccaacctttggggaattgtttgggcttgacacatagcaacacttagaagtacatttcagaacccttattcagttttgtgtgggaagaatttgactcaagggataaactggctcaggtgtgtccatctgcatagaaacctccacttgattgtaagcctcttccaagatttagaaaggctagaagcaaataatttttacacagcacaaacttttaagagattaattttaaaatttatttttcctccaccttgtttggataagagtttccttttttaaaaagatttttaaaacaaaggtgcttcatgtgtgcgaacatgatccattgtttcctctttcttcaagaatgaattttggactcttaccacattagagataacaaaggccttgggaaagtgttgaaaatcattgtccatttataaattgatgcccttaggacatcacatcttgctttccatcaaacacaccaagcgctcaagcccaacagagattatagattcatgcaaaaaaaagaaaaaaggaagaagaaataaactgatgccttttgtcctttcttttctaagacatgtcagaaagcaggatatctagtcttcgaaaagcactcaggaagtcatccttgctgtccttgatactttcgtcttttcactgtgccctgatacccagtttaccaacacgtcctatcaattttacctccaaacttagttccactccatttaatccatccttacctttcataccataccattgtctttgacctagatatttaaggacttcttaatagatctctccaaattagaatggattccacccccaatctggaaccagagtaattttctttaagtatttttactttgaattctcacttcaatgtcttcccgttggtttcccattacctttaagagatggtgtccagtcctcgaaccagtctatatggctctgtttgacctggcttttgcctgtctttctaccctgagggtctcaaccatcttcgctaatgaggaacaactagagagcttttttcttccccccaagaaggagcttttgatttagctaactagaatagggcctgcacatagataacgttttcaaagcgatccatgtgattttcacatgcagtaaaagtggagaactgcagatctgtcctcatttcctcatttctcagcatcttttccattgcttgctctgctccaggcatgccagcctttgagattttcaagtatgtcgtggtttgatttttttttaattgtttcttcagcttaggataattttcttccctcttttaacctgaccaatttccaatgactctttaagtctcattttaaacgacgcatattcctggaaactttcacaatactgctcactttttcatggcagttagcataattggaattctaagaatttgaaagattatctgtgaatagttgattctctgcatgagtcatcttcatgagtatgtgtctgttgttttctgccatatcctcaatgcccagcggccagcccacagtcggccctgacaaccctggggtgttgaacaatgccctcttttcttccctgtctcctgctgtccttccatcattcagtatttatggagcaggcagagtactgtgggacatggctgcttatctcacccagaatcattaaggccatttctagctcttcttctgctcgctgagagcatggattaatgggctgacattgctcaagtgtttgaaaggtaatgaggcttctaggctcctaatcagtttgcctctgctaaaatggagactatcaggattttagtttcttttggccattatcttcacattatggctggtttcttcccctcagcattattttgtgttattcgggtttatagaattattatttacatgcaataaaatccaccaattttaatctacaatttgttgagttctgacaaatgaatgcagccaggtaaccatcaccatgcttatgacagggaacatgctatcacctcgagacatcccctgttccctttgcagtcaatgccccactcaacaccctgccccctggcaaagatctactcatgctatcacctcaaggcatcccctcttccctttccagtcaatgccccgctcgacaccctgccccctggcaaagatctgctttcatcactataattatgctttttcctagaattccatatgaatgaaatcaagcagcatgtcattctttttttttttttggcctggcttctttcacttaatgtatttttcagctccatgcaggatgtatcagtagttcagtttattttggttgctaatacttgatagtttactgattcactcactgatggatgggcatttatgctatttttaatttggggctatataaatttttacaaatatttgcctacaacactgtgagtacatatatgttaacattttgcttgaataaataactgggcatataattgctgagtcttatggtaggtgattgtttataagaagcagtcaaagcattttccaaagtagttagttctaccattttcaccaacaatgtatgaaaattctagtttttctatctgcttgccaacactttttgttttggtcattctggtgggtgtggggtgatacgtaactgtgattttaatttgcatttccttaatgactaaccacattgcattttgccatatgcatattagccacccatatattttctttggtgagccgtatggtcaagtcttggctcattttttaaaaatgcattatctaattaatggatattaagaattctttatatattctggacatcttttattagataaatatttttcaatttttttctagtttctgatttgcctttggattttcattatgatggcttttaaagaatagaaattttaaatattgtttaggtaatttacagattcaatgccatccccatcaagctaccaacgcctgccttcacagaattggaaaaaactactctaaagttcatatggaatcaaaaaagagcccgcatcgccaaatcaatcctaagccgaaagaacaaagctggaggcatcacactacctgacttcaaactatactacaaggctacagtaaccaaaacagcatggtactggtacaaaaacagagacatagatcaatggaacagaacagagccctcagaaataatgctgcatatctacaactatctgatctttgacaaacctgagaaaaacaagcaatgaggaaaggattccctatttaataaatgtgctgggaaaactggctagccatatgtagaaagctgaaactggatctgttccttaaaccttatacaaaaatcaattcaagatggattaaagacttatacgttagacctaaaaccataaaaaccctagaagaaaacctaggcattaccattcaggacataggcatgggcaaggacttcatgtctaaaacaccaaaagcaatggcaacaaaagacaaaattgacaaatgggatctaattaaactaaagagcttctgcacagcaaaagaaactaccaccagagtgaacaggcaacctacaaaatgggagaaaattttcgcaacctactcttctgacaaagggctaatatccagaatctacaatgaactccaacaaatttacaagaaaaaaacaaacaaccccatcaaaaagtgggcgaaggacatgaacagacaactctcaaaagaagacatttatgcagccaagaaacacaggaaaaaatgctcatcatcactggccatcagagaaatgcaaatcaaaaccacaatgagataccatctcacaccagttagaatggcaatcattaaaaagtcaggaaacaacaggtgctggagaggatgtggagaaataggaacacttttacacattggtgggactgtcaactagttcaaccattgtggaagtcagtgtggcgattcctcagggatctagaactggaaataccatttgacccagccatcccattactgggtatatacccaaaggactataaatcatgcttctataaagacacatgcacacgtatgtttattgcagcattattcacaatagcaaagacttggaaccaacccaaatgtccaacaatgatagactggattaagaaaatgtggcacatatacaccatggaatactatgcagccataaaaaatgatgagttcatgtcctttgtagggacatggatgaaattggaaaacatcattctcagtaaactattgcaagaacagaaaaccaaacactgcatattctcactcataggtgggaattgaacaatgagttcacatggacacaggaaggggaatatcacactctggggactgtggtggggtggggggaggggggagggatagcattgggagatatacctaatgctagatgacgagttagtgggtgcagcgcaccagcatggcacatgtatacatatgtaactaacctgcacaatgtgcacatgtaccctaaaacttaaagtataattaaaaaaaaatttatcaaatatctctattataatttgtgatttttagagtccaattgacaaaatctttgtataagcctgggtaagcacaattatcttcatgtttttatctaaaatattatagttttagctcatatattttgatctgtaatctatgttaatttctgtatatagtggaggtcaagattgaggttcattttcaccctcatggatttctaattgttccaggactatttgtgggaaagatttcatcaattttacatttcattttttcttctttgccttcttttgtatgaattagttattattcttgtgattcaattttattgtctatcttggtactaaaccttcttttttagtgttttctccaggatttatattacatgtttatttatatatgtactataatgtagtacatatttaccacatataccataatatatgtactatgtgtattatatgtatagtacatattaagcacatataccataatatatacatatattatgaacataatacatatgtgcatatatttgtacatatgtattatgttcataatatatgtatatattatggtatatggtaatggtatggtatatggtatatggcaatatggtgtgtggtaatacatatgtacaaatatatgtacatatgtattatgttcataatatatgtatatattatgtatatatatacatacatactattatgtatgttacacacatacataatatatgtacatatgtactataccgtaatatagtacatatttaccatagtccattttcaaatattattttatatctatgataatgacattacaatgatgtacttccagatctaccctctcagcctttatgcattgttgtcacattatttttacaaatgttataaaccgtagattacattgatattatttttgtgttaaatacttacctttaaaaggtaagaatcctatgtcttcaaaaatcagttgtatttccatgaatgctgactgagcaaaaaatctttgcattaaaacgtgagttaggttgaatagacagataggtagatatagatatgtacatacatacatatgtgtatataaacccttgcatatatatgtatatatttgtatgtatgtgtatagacatttattactgacttacactctggtttactaggcataacttataaaataagtaattaatatgtgtaatacattggttatacacagatgaaaatatccccaaaacacataaaattatatttaaaatattaaaatgttctaaaaaggtacttcttaatttctaaaaaagaactcctttttctggtactctaaaaaacagttattaatatcgactatatcaagtatctttcacttcaatatttattttttctttgactaggtttatggaaatcagctggggatttttttttaagcaaagttttacgattaactccgccttttttcgcctaaataatacatctggcttccagatttccaacttcttattcctacaagtcacctagtcattaactgaaacattaaattggtcaacagtaccaaataaatacaatattatttatttttgttagacctacaaaatatttaaaaggctaatacaataataaaataaataaacttgaattttgactgtaaaactaatagagcatgaaacacagtatctttaatttggaaatataattctcagggcaaaagcaattcttcaggaaagtgaggaaaacattgctcagaatctgccttctgtaaatagtccaggcggaggaatgagccggttgtattaaagtttctccattcgaagcaggtagcccttatcagccattttaaatccatagaataaatggagttgggtctgccaacttattttctgtcctggaagcaactatcacatcccagtggttactggttctgactggcaatgcatgttaaatgtagtgattaattaacattttaaaaccgatgtgtactctcactttcttagaaacttcatctaaaaagcctgactttgcacagcggaaagcaaaaatcatcattaaaataaccaaggctgctcgtagacagaaatgttctcatcccggaagcttttccccacccagatacactgcaagtctgtgtgatcacaataagtagacatttctcccccaggcctcagactcccttacctacgcttctgttttggtggggctggggttgaatctgattatctgaatgatgaatggaggttccaagttatcctcatgagtagtttggaattggtgttttagggacttgctcttacatgggcaggaaccacatcaagatttcacttgcgtcctgaaatgtacaaataagcaataccaagaaagagtctttgctgctcagtcagcagtcagtaaaaccacaactcttgggttggggattttctggattagaaggtatttctcactagaccaaagactgcatttattgggcaaaacagtttttattttagctctggtcctggctgaatgcactggtcactccacttggacatactttgattccctgaaagcaactcattctccctggtaaacacgatgcttgtgcaagttcacagctccttaatggtcaatctgtttatgttatgggataagcaaatctgaaaacacaacagtggtcactaagggcctgcaagagtccctagacatatggtatctgctcactggaaatgtcctcttggaaagagagagagaaagaggtgaatgctgtcatggtaataatgcattttttaccaaacattttgcagtagtggaatattttgactgctttggagtttagccaccttctttagagaaatgcacaatgcagaacaggtgaagaaacattttcatccattataggggttgcaagaaatagagtcaaaattcagtctgcattcagaaaaagaagtaaaaattttgccaagattaattgctggagacaagatacgctgttaataaaagtgctgtaaatgaagattatcagagtatcagtttcctactctgctttagaacttagcccaaggacacaagcagactcctaaaaatgagttttaataactttcttttttgcttgtgttagtctgtaggcaaaattttgtagttttaataataatctctgacagtaataagttcctctagtgtttatacctccctaacaatacatggctataattactgtagcaggaaatttaataagtctcagaaagtggaataaatatgatgttgtgttttctgaaaaatattaatccccctctctttgtgttttcgttatttgagatttttgatcaggaatactgtctccagtgcccctttgcctggcgaggagtgaggtgcatgggcagagatgtggtagtacatcttcaccactgaagacatttcctttctactttattccctcttttaatgaaggattgctcaccattctcacataattcagcgtctccccagatattatcaggctaattgtgaaatgcctcacatctctatattgggttaaaaaatgcattacttagattaattttgcctgcttcttagtcacttataaaagctaaagccccgcagtcatcatcgcccccttctcctccgcagatcatccgttgtgtaccaatcctcaggcatggctttcccatcttccccacctcactggcatctgttctcaaacccttttactgacttcttctccatccaacttgtaaatcttgtaaatcactgaatcaggggcaaaatttcccccaggagacacgtggcaagtcctgggacatttttgtgtttgctgtcacatttcagaatggggtggagaggaactcctggcatctaatcgtggaggtcagggatggtgtagagcgtcttgcaatgcaaaggacagctctcatcacaaagaaatatccacccaaatatcagtcgcgccacggctgagaaatcatgctgtaaatgttgaactctcccagagctctattccaagtcttcccctacctgtacattcttctacactatttccagtctcctgctttatgtatcactcactcgtgggtgactcccaaatatgtctccagccttggtctctcacagatcactggattccatatccaactctattcttgttatctccctttgtgtgtccattagggacttcaaacttacagtgaccaaaatagattccttaactttgacctcacaatccacatctccctggtattcatcattttcataaatggcaccaacatttactcagttgctcaagcctgagctatccaatatggcagccatcagccctatgtagacactgaactcttgaaatatggctggtctgaattggaaggtgctggaagtgtaaaatgatcatggaatttcaaagacttagtataaaaaagaaggtgatatatctcatcaataatttttaatttttagatatcaattgtatattgggatgataatattttgtgtatgatggattaataaaatattacacaggtggattcagaggagatgggagagcagcaagcaccaagacactgtctgcccatctagacaaccttgcattgtcagaatctgtctgatgtgagtatttggggactctggagttgaacgaaggcttgcagcttccaggggaaggcgtggatgggaaagtgtggctattttcagtcaatttgagttcttaccacagtacagtatgaggtacccatttcccactctgaattccatgacaggcagataggtatcatgagtatcttctctcacccaagtgggataaagttagaaatcaatacagaagtaaaactgcaaaatttatacatttgtggattaaacacacagacaaccaatggattacaaaagaaatcacaagattcatttataaaaatacttatagatgaatgaaaataaaaacacaacatactaaactgtgggatgcagggaaagtgatgctgtggggaaatttatagctgtagatgtttccattaaaaaaaagcaagatttaaaatcaacaccctagtttaaaatgtaaggaactagagaaaagaacaaactaaacccaaagctagcatagggaagaaaattataaacattagggcagagataaacaaaatagagactagaaaaataataaagaaaatgaataaagccaaaagttggttctttgagaagagcaataaaattaacaaacttttagcaagctcaactaagaaaaaagagagtagactcaaattattaaaatcagaaaggaaagcaaggatatcacaaccaattttccagaaataaaaaggattataacaaagtacttatatggaaaattgtatgccaagaaattggtaacatacatgaaatggacaaattcctagaaacacaaaacttgccaagactaaattatgaagaaatagaaaatctgaacagacctatacgtagtaaagagactgaatcagtaatcccaaattttctgacttcactggtaaattttatcaaacatttaaagaagaactaacatcagtctttatcaaacctttctaaaatattgaagcggagaaaacacttcctaattcattatacgaggctagtattagcctgatactaaagccagacaaagaaattacaagaaaaaacaaaataacaacaacaataacagacaactatagaccaatatgtcttataaatattagggcacaaatcctcaacaaaatacagtcatgtaccactaaataatgaggttacatgctgagaaatgtgtcattaggtggtcttgccattgtgtaaacatcatataatatacttacacaaacctagattgcatagcctactacacacctttgctgtatggtatagcctattacacctgtgctaaaactctgtgcagaatgttactgtactgaatgttgtaggcaattgtaacacaatggtaagtgtttgtgtatgtaaatataaaaatgtatagtaaaaatatgatattataatcttacagggccattgttgtatatgtgatccactgttgaccaaagtgttatgacacacgtgactgtactagaaaagtgacttcatcatcaaataaaaaggcttatataccattaccaaatggtatatattcctggaatgtaaggatgtttcaacttatgaaaatcaatcaatgtagtagtataccgcattaacagaatgaagaggaaaatactcacaatcttctcaattgatgaagaaaaacatttgacaaaattcaacatccattcatgattaaaatgctcaataaactagggttacaggaatctacctcaacataataaaatccaaatgtgaaaaaccgacagcaaacatcatactcaatggtaaaagactgaaagcttttcctataagatcagaaacaaggtaaggattcccattctcaccacttctattcaacatagtactaggatttctacccagaacaattaggcaagaaaaagaaataaaaggcattcaaactggaaaggcagaagtaaaattatcactgttcacagatggtatgatcttattcatagaaaaccctgaagattccacacacaaaaatggtcagagctaataaataaattcagcaaagttgcaggatacaaagacaacacacaaaaatcgtttgcatttttatacactaacaatgagcaatctaaaaagcaaactacagaaacagttcaatttacaatcatatcagaaagaataaaatgcttagaaataaaactaggagataaaagacttgtacaataaaaactacaaaacattactgaaagaaactaaagaagacataaaaggaaatgcatcctattatcatgaattagatcctcacgcagagagcctttaaggaaatgaatgagatcccatctacctactcgtgttctttttggctctgctattcattcttgaaacccaaggtaacagcttgcttcaataatttgtggtttggtgtgagctggcttccttgtcccacagctgggcatttggttcatggctctctacagctatctggtgcgagtgtatgatatggatggacccactaaagaagataactgatgtgatttcatattgttaagatgtcagtactacccaaagcaatctacaaattcaacaaaatccctagcaaaattccaattttttttcagaaatagaaaaacccatcctaagatgtatatagaatctcaaggaactccaaatagacaaaatcttggtaaagaagaacaaagctgaaggactcatacttccttatttcaaaacttactacagtaatcaaaacagtttaggagtgtaaaacatatagaccaatggaataaaatagaaaacataaattataaataaaccctcagatatatgatcaggtgacaagggtcatttttgacaagggagccaagatcattcaatgggggaaaggactacattttcaacaaatggtgctgggaaagctggatatccacatgcaaaagaatgaacccttatctaacagtatacacaaaaattaactgaaaatggatcaaagatttaactgaaacacctaaaactataaaactcttagaagaaaacttaggccaaaagctttgtgacaaaggatttagcaattatttcatggatatgatatcaaaggcatagacaaagaaaaaaattgacaaataggatttcataagacaaattataatgatggttgattgaggctgggggaagggaaaaataataagttattttttaatgggcatggatttcagttgtacgaaataaagagttataaagatggatgctggtcatggctgcacaacactataaatgtgtttaataccaatgaactgcacactcaacaatggctaagatgacaaatcttatatactttaacacagttaaacattggaaaaagttaaattcaaaggcaatgttataaaaatacatttattatactttatttcacctgattctttttaattttcttaatgtggccactggcaaacataattaccttatatttctgctgaacagctctactccaaccaatgctcataccatttcatcaacaattcatcaacttcattttggcttcaccccccaagctcatcttaaatgccgcacttctatatcctcaccacccccaccagggccaacgctaacatagtcttctgctcagctattgaaggagcctaataagccttctcctcgcttttcattttgtccacatgccagccagaatgctcttttaaaagcttatgtccagtaatgccactctcctggttaaagccctgcaacggccctcacataacacaaaatatccagttaccttgactggtgtccagagtcctgcatcacctgttctgccttattctcccatctcacctctcaacacgctgcctaatgcccacattattctaaacaccttggtcttttgcttgcctccaggactcaccaaagaacatttgctctttcaagtctttgcattagctgatctcgcttcctaaaatgttattttccatgatcactgaatgctggatccattttgtttccaaatatcagtttaaatgacatattaaaaacttcacattaaagtctaacttgaacacctaatagaaaatcaccactcaacccctcaagtgctctcttgtgacatcaaagtatcttctgtagtggcagttgacatctgtcatcatttttgtttcctccacagagctctctatgagaataaaaacttcttgctcacctccatattcccaacattaattggaacataaaaggtacttaaaaatactttgttttttttaattatactttaagttctggggtacatgtgcagaacgtgcagatttcttacataagtataaaaaaataagacatgcagccaacaaacatatgaaaaaagctcatcatcactggtcattagagaaatgcaaatcaaaaccacaatgagatactatctcacgccagttagaatggcgatcattaaaaagtcaggaaacaagagatgctggagaggatgtggagaaataggaacgcttttacactgttgatgggagcgtaaattagttcaaccattgtggaagacagtgtggagattcctcaaggatctagaaccagaaataacatttgacccagcaattccactactgggtatatacccaaaggattgtaaatcattctactataaagacatatgcccacgtatgtttattgcggcactgttcacaacagcaaagacttggaaccaactcaaatgcccatcaatgatagactggataaagaaaatgtagcacatatacaccatggcatactatgcagccataaaaaaggatcatgtcctttgcagggacatggatgaagccggaagccatcattctcagcaaactgacacaaggacagaaaaccaaacaccacatgttctcgctcataagtgggagttgaacaatgagaacacatggacacagggaggggaacatcacacaccagggcctgacagagggtggggggcaaggggagggatagcattaggagaaatacctaatgtagatgatgggttgatgggtgcagcaaaccaccatggcacatgtatacctatgtaacaaacctgcacgttctgcacatgtatcccagaacttaaaagtataataaaaaattaaaaaaaaaaaactttctaaagccaccttgtcaaattgtagtcaaactctgggaagtttagtaaacccagaatttccttaaacagaaatatgctgtcaaatatttcactctcttaatccccttataaacatgcgtctatctttttttcttaatcctcttcccctccagctcttacttgatctctctccctcccactctgggatagctttctcaaaggtagtctacactctgccttctcatcaatttccatttccttcctagtttattccactctactgttcttctgtcacctaggctgaatcccataggcattttgtggaatttctcgttgcttaattcttctgcaccacttgttgatcatttctttttttaagcattgttacctcgcttttgttcttctctacctctgtgcttgagattctccatttgcatcttctgattcactctttccctttctcttcctgcttgggcagtgccacaggtgctggccctatggatggcatctactgatcacccttgccctctggtcttctgttgggttccagccatgggggtggggatactagtagatgggatagtgggaggagggagaagctgaggtattgatccttctggttctgcccagtctagttcacagcagtgcctgttttcctgcatcaaagaccaacactctttgtgggcttctctccccaacatctacatttctctctgggttccaggagataccccctttgtttgcccttcagaacagttgatgggcatgctcccctgctggtgctccccaacgcttcctcttaccttgctcacatccttgcagtctcttcgtcagctccatctgtttcctgtgggtatcttgattaatatagtctccttggcatgttactctttcttcaagaacctgaaaggttggttttccccagtgtttcatcttctatctttcatagtcacagggtctcaagtattgtttgtgaatctttgtctcctaaagttgcaatgatcatggataagctgatgattttcaaatttttattctcatttcaaaactcccttttgccattcagtcatttgtatataattgccaggtacattcctttaatgtgtcctgaagggaggacatgataggaaaacagatatttttccaaagtaagtgtattaatccatgttcacattgctataaagaactacctgagactggataatttataaagaaaagaggttgaattgactcaccctttccatatgactggggaggcctcaggaaacttacaatcatggcagaaggcaaaggagaagcaaggcacgtattacaaggaaacatgaggagaaagcaggtaaagagggaagtgctacacttttaaaccatcagatctcatgagaactcactatcatgagaacagcatggggaaaccaaccccataatctaatcatctcccaccaggtccctcccttgacacatggtaattaaaaatcaagatgtaatttgggtggggacacagagcaaaaccatagtagtaagggaggaaattctaagggtctgtctcaggatacaatggattccatacacaggaattattcatgaccagatgcaacagttgagatgactctgaggattccttccaggtcttaccttcaataagctggaaacattgcactgcaaacatccctagtagaacagatgccactgccagaggagttggttgggaacatatctttgtgtgtgtatatgggagtatttgtgggcatgtatttatatgtatctggaagtgtgcatatgtataaatagaaggagatattaattatatatatacatatttttaatgcctgcaacccaaataaaaataagctccatgaagaatggatgagctgacaacacactatccaattttgcatctggagcatgcacaggaatttattacaagcagcagccagactttttttggacatgtaataatcttttattctgttttatgtgaaagttaaaagctaaagaatgccatttgcagaccttcagcaacttctagcttggctttagaaattcattgcagaagatggagaactttgatatagggccaggacaatgacattcagcacccagatcttaatttctgaattgattctccaactcagcccctgttctgtttgcagagatgacagaagagacatccaggagtagatttcaatgcacagcagcagctgagagaagccagctgtgaaaaagtgagtgatccccacacccatgcacatcatttattataaagacactgccatcatttttatcatgaaacttctactcagacaaaagatttaacatcaaagaagagcattggtgaggcttcaagttgctatgattattgagaaatcctatagtggcttgaatcgactctggcaaggtaaattcaccaagatcccagggatgcgtctcacatttgtcccacttgtcagaggaggtcaggcaggaaatgccaaacgagagaaattctcctaaatgaggtcaactggtacgctgattagtgtgtaggcaaacactgatgatgcagacaggaaagggggtgaggagaaaatgttacccttgactagaggggagaggaggccttccctcccaaccctattcagttgcagacttcacaggactgccacaagcgacactgaatggagagataaaaagatgataaaagtcacaggctacaatcctgttgggctttgcggctgtgggtttccagagcgaccgtccctgcaggcccctggacctgccaccttgtcagcaggtgtgtctgactggctgtggctaggacaagtcaaaggggccaaaatggccccaaaggggactggtaaatacttgggtcaaatgagagaaagaaggggatgacagtgctatattgtgggtcttccacaccagtctggtcattcccatattcaagagctgtccattaccttcagaactgctacaaggctgtctttaggcagcttagcctcccaggttcttctatacagctaaatatatacacagaaagcttttattgtgtctatcaaaagtctccagccaagtgcacattccttgggcctgaagaggctaacattcttccatccacttagcaggcatttactgtgcactgagtcagtgctgagggctccagagtgaaggacgcacagcccggccctcagaagatcagctcacagtgggtgagggggaaagaccagcaggcaatgaagacgcaacgtggcccacctcctccccgaggacagacagacccaaatattgtggatcctactgaggtccctgagcttctcctccagattcagtcctgatggttggtcatcttccacggctgcttgcttccaggcctctgtacctgccttccttcttcgcttgccctccccatctttttcttgcatccctcactgcactgggctctagtgactttcaggtctttatttccatgccatctccttgagaaagacttccctgcctccctggtcagctgtctattttctgtgttccttcagacccctggttttcctgtcacctatctggccatgttgcatcttcattgcctgcttgtctctccccctcacctaccatgaactggtcttctgagggcaggggctgtgcatccttcactctggagccctcagcactgactcggtgcacagtaagtggctgccaagtggatggaagactgttagcctcttcaggtccaaggaagaagggtgtatttggctgggggctttctttgggtagacaccaggaaagctttctgctttcatatttggctttatagaagaacccaggaggctaagctgcccaaagacagtcttgcagcaggaactccctcttgatttttcagggtaagctccgggcagtggcagggatggaaatgtggtcagggctagaagagttttgatgagcatgatagagaaatcataaatgacctcagaaaatactgaagtcgtcctgaataggctgttagaaataccaacatgaggggagctgtttagaacaaaggctcagaataaagtgaggaatgtggcattgagaagtagaagaggagaccagaaggggaggtcagagagacttgaggtcaaacggctgcagaatgcccgtaccggcttgaagatgcagggccatgcagagaaggcactgatgctgccagcattctgttagggtgtggaaggggtcctctccagagtgcccaggtgacagccccacccagccaacactttggtttccatatgtaagagctggagctgaggaccaacaaagctactctgtgcctggactgcagactcgtgaaatgttgagatgatagatgggtactgttttaagctgttaatattgtggtaatttgttatggcagcaacagaaaactcacgcaggttttcctgaagttaaacaggtgagccctggggtctcccggagggagggagttcatttcctggctatgcctcccattacctgccaccaccatccagggcttcattcctcctttgtgaaatgtgacagtgagagccacacagcactatgaggatgtaaggacgtgtcacacgtaaagccagggaatggtccattgtacaaacaaagcccacgatatatgtaagctgccatgcaactaagttaatgcaaatccctgttttctttgttcccttggaagataaaccatagagagtctaaccaggctgctgcttaaataaaaccatgtggccctgagcaaaagccagaggttgcacttgctctggaaaagcctgttgtggctcctgcgtctaccctgtcctctaacagaagctgccttaactcaaggtggtcgggttgcctggccaaagctggttgagttagtgctggacacttgacccatgctgagctttctgattctctgtcctggggacccagagaggggacagcgagaaccttcttccttagccgtgggcagtggaacagccacagtggggcatggggccagagtcaaagccaaggagtcagctggtcaaaggatgagcttgcagcacagcagaaattagaagccacacagagggtgagtcttgctttgcagagaaggccatgctaatgttgacatgccatcatattatcgcgggagccatgtggactgtgtgcttcatctgtgtaatgcagtattctggggcttcatgtgtgacatctctttacatcctcacaacaccatgtggtattctttgtagagacggggttttgccatgttgcccaggctagtgatcactattttcttctagttatttctttgtatctgccacctaagcactgatgtggggtaagatgtgatcctcaggtctcttgtttacctctttcctctagatggtgagcaacacttgttctgtgcagccagcatccctttcctgcatctttgattacaacatacacctccaccttctcactgtctcatttcacaaaggaggaaagaaaccctgggaggcaggtggcaggtaatgggaggcagaggcaggagctgaacttcctctgggagaccccagggctcacctgcttaacttcatgaaacccaggagcccagagaaacagacatcagccacccaagaactgttcccacaagatctgttcccatagacccagactatacttcccatgctggtatgcctgatgagtgcctgcatctttaaaaatcttcttaaagattattaaattcctcttcaaaagttacaaaagcaacatggttgttgacagtataggaatataaggaaaacttgaataatgtccccagccccatactgatcactcctgaccctgggagccacgtctttgttcacagcccgaggtgtttccttccgcacattcttgtgctcatgtgtcttttgttctttgatttatttgtttctacaaaatgtattccattcacctacaactcctcttgtccttcacctccattttctccttaacatttctttgtgaacatccctaaatcaacaggtaacagatagaggcagataaagcatggtctttcgtaataaaaggaaaccacaatttttcactcataactttataaaagaatagcacttgagtccagcatttttgttttgccaccacaataacgtaaaaacaaacaacttcttgcccatatatccttgtatatgttgcctgtgttttaaagaggcaggatggagaatggccaagtggttaagaagcccagatgctagatgtgtggtattatttctgagggctctgttctgttccattgttctatatctctgttttggtaccagtaccatgctgttttggttactgtagccttgtagtacagtttgaagtcaggtagtgagatgcctccagctttgttctttttgcttaggattgtcttggcaatgtgggctcttttttggttctacatgaactttaaaatagttttttccaattctgtgaagaaagtcattgaagtcattggtagcttgatggggatggcatttttatcatggcactattcacaatagcaaagacttggaaccaacccaattgtccatcaatgatagactggattaagaaaatgtggcacatatacaccatggaatactatgcagccataaaaaaggatgagttcatgtcctttgtagggacatggatgaagctggaaaccatcattctaagcaaactatcgcaaggacagaaaaccaaacaccgcatgctctcactcacaggtaggaattgaacaatgagcacacttggacacaaggtggggaacatcagacactggggcctgtcgtggggtcaggggagggatagcattaggagaaatacctaatgtaaatgacgagttaatgggtgcagcacaccaacatggcacatgtataattatgtagcaaacctgcacattgtgcacatgtatcctagaacttaaagtataataaaaaataaaaataaataaaaagaagtccagatgctagaatcaaaatatgtaggttcaactccctgccctgctgtttgcaaaatgtataaccttggctaagtcgcttaacctctgcaaggctcaagtccctcgtatgttaaacagggactgtgctggaggaactccctaggattgctgtgaggaattgtgttaatcatttacgacccttagaacagagcttggcacacaataagtacttggtcagggttagttatcttcattatcagatgaccattgtcattattgcggtggcatagggtcactggatggattcccacatgaagaatattttgtataaattcactttctttttcactagactcagtcccatgaggtttctataactttgtatcataacactctaaggcactactgaaatatggatgcaatgaattcaaatatgaactataactaggcgttgtaaatcgagtttgccctaataatcattttcgcaatgttgacttttctggaaataataagtctaaatgcatgtgctagctctgggcccatcatgggagggagaactttataagaagatcattatctatctcttgctctttcattaaacgggattgtttttaagtcaaatcaattttctacctccatggtccaagcttttggcaaatttgcatcataatcatcttcttcatccacttggcagatacttaatgcaagtcatcctgtccacaggaaaacacacatcatagacataaaatgtgtgttctccatttaatttttatgagcacttagtgggtaaccctttgtttttattctcccccttgatgtcaaattacttcatatgtcttttcgtagtttgtctaatctacaattgtatttctcattatcattttgtgggttgtggtgctatttcctccagtttcattctccctcttttatgtttctcttgtacaaaattaattacattgtaccttcaagcataattttaacactgtctccattgcactgtgtctgcttttaattaatactcttctaatgtagattttaaagccaaatggtgcaatattgtgagcatcaaagaaacaaagaatctaacaaaactaaaatgaatgagcaagacaaaaacagctgacaatgtgttctcatttgaaaatgtcactttcgctgtacattgaaagaatggattacttggcgctttctctaaaaaaaaaaaaaaaaaaaaaaagacaagagatgttgactccagatttctggtgccgttggtctgagttttacttggactcacactgagcaaatatctcaagaggaattaaccaaacacagcagtctcacaactcaaggaaaggggaggtgaaccccacaaatacatttctcagaagttttctgtagaccagatacggcaaaccactcatcttgaacttcagcctgtgtttttcatgtcgcaaagactctgatgatgctgtgtccctttggtgtcccacacaaccccactccaaaggagaaggaatctctttgggtttctgtcagtttcacggaagagaaaatcaaacacagtagaactacatgtatcgtggctctgtgaattagtgaaatgtccaaataacaaaatatggaaaacaaacaaatgtcatcttactactttttgattaatgaatcagcttgaacttctacctaataagctggactgctttaaaaatgtgtgtgtctgtgtgtgtgtgtgtgtgtgtgtgtgtgtgtgttatgaatttgtagtaaaatgtggatacatgtaacgatgtatatgcattctaaaatagacaatttgtattgggtgggtatattgtgtgcagttttatttgttgccttaagtgattcaatgtatctttccttacaaaaattagactgaatgggtaataattttgaggtaacagaggctgagtccctaatctcagaccgtagggagagatttgatttgattgagacaatgtaatgtgaaatgaagtctataggtttgtgtgtcagagtagtctcagctctagtcctgatttagtcaataactttctgtgggaacgtgaagtatgtcatttacaaccattattttctttgcctggccttcccaaatttctgcaaattgtcattgtcttcttcctcctgaccttctgtactgatagaattgtagcatccaaagtgggaagattattactctgcccatacccagatttgtcatggtagtgggtcaggcctccaaaaatatatttgcctatctaattcctggaacttgtgaatatgatcttatgtggaaagcatctttgcagattaactagggattttgagatgagatcattccggattatccaggtggaccctaaattcgatgacaaatgttcttataaaatagaaacagagggagacttgagacaggaagaagagaaggccacatgaaggtggaggcagagactggggtgccggggccccagccaggtactgcctggagtctctggaaactggaagaggcaagaaataggttctcccttagagcctctggtaggagtgtggccctgccaacacctagatttcagacgtccagccttgagaactgtgaacgaataaattcatgttgttttaagccacccagtttgtggcggtttgttatgggagcccagagcccagggaggagtgtgtggtcactgaatgcaacgtaggccaatttccagacattcaatgttgggctaagagtttccagccacagtcccactgttagtttgatcacaggaattacaaacttggggaatattgttaatggccattttgtgccatgtgaactgaaaaatggaaaagtctatttggtggaaagagaagaatgaaacaaatgtgcagagaaggggagaggcagaggtgagacagaaaaattctcatgtgaggtttagagcctgtcaggaaaacagaaagtactaggggtttcagagagaatttaacatagggagcttgttaaaggtgatggaggggtgaggaattaggaggtgggaagtcaccccagagactggcagtgggggagccttccaccactcaggagggggagacaaggaggcagtcgtaccagggatgggagccctggcagaagctggaagcagtgggccctgtccagcaggagctgaagccatgggggagaaacagctgctgtggacgatgccccccagtgtggagagaggagaataaataaaccagtttcttcttcctggaccttccagtctcctgtctgtgcctctcttgggtcacacgcagccagaagccagctgaaagggaggctgggaagtgcctgagggagttggctccctccacagaagggaccagaggaggaggaggagtttctctgagagcaaaccagatctgctggaaatccacatcctgggccataaaacacacctcgcaactctaaaacaatggaaatcatgccaagtgtattctcagaccataatggaattaaactagacatctactatagaaagatagctagaaaacaccagagtgttgacagatgaaaccacacacttctaaataacacatggatcaaagaagaagactcccgtgaaatttaaaaatattttgaactaaatgaaaataaaaaccaaactcatcaaaatttgtgggacgcagcgaaagcagtgcttacggaggcacttctaccctgaacacatagatcagaaaagaaaaaggatctgacatcattaatctatactgccactctaggaaatgagagaaaaacggacaacttcaacccaaagcaagcagaagaaatgaaaccataaaaatcagggcaaaatcaatgaaattaaaaacagaaaatcaatagaaaaacatcaatgaaactaaaagatggttgttcaaaaatataaatgctgtagactgaatgtttgtgtccctccccatcctaatctctaaggtaatggtattgggaggtgtggcctttaggaggtgattaggtcatgaggacagagccatccaaatgcacttgtaaaaatgactccagggagctccctcttgccttccaccatgtgaggacacagtgagaagtgccatctatgaaccaggaaaaaggccctcagcagacaccaaatctgcagacaattggatctgggacttcctgcctccagaactgtgggaaatttctgttgtttgtaagccaccagcctctggtattttgttattgcagccactgttagcagtggaagctatctgtatgggtctgcagcaacctcaggtcttgcctcctgagaagaaagaatttgactgaggggcagaaggcagaaggagagaccaaggtaagttttagagcaggagtgaaagtttaccaaaaacttttagaagaggaaggaaaggaaaaaaagttcacttggaagaaggccaagctggcgacttaaaaaacaagtgcaggccaggcgcagtggctcatgcctgtaatcccagcactttggcagggcgaggcaggcggattacctgaggtcggaagttggagaccagcctggccaacgtggtgaaaccccgtctctactaaaaatacaaaaattagccaggcgtggtggcgggcacctgtaatcccagctactcagggggctgaggtaggagaatggcatgaacccgggaggcggaggttgtggtgagccaagattatgccattgctctccagcctgggcaatgagagcaaaactctgtctcaaaaagaaaaacaaacaaacaaaacaaacaaaaacaagtgtgcagtttgactttctgatttggagttttagacatgggcacacttccagggtcttgacttgcattatttctcccaactctgagatcttatcaggaagctgctgatcaccagtttcaggtggtgttttctatcaattaggagactggctgggcacggtggctcacactgtaatcccagcactttgggatgccaaggcgggaggatcacctgcggtcaggagttcaagaccagcctggccaacatgaggaaaccccgtctctatgaaaaatacaaaaattagttgggcgtggtggtaggtgcctgtaatcccagctactcaggaggctgaggcaggagaatagcttgaacctgggagatgcaggctgcagtgagccgagattgcaccattatactgcagcctgggcgacagagcaagactctatctgggaaaaaaaaaaaagagactacatttccctggcaccagctgtgaccaattattactttagggagacagttaaccacctgaccatcacctgatggtctccagactctcctggtgtgtgtggtggggagccctctcctgccctgctcagaccagactagctacccactgtaacatgaacagactaagacaatgaacaaagtagataaacctgtaagagagaaagacacacattgctagtattaggaatgaaaaaagggggcgggcatggtggctcacgcctataatcccagcactttgggagaccaaggcaggtggatcacctgaggtcaggaatttgagaccagcctggccaacatggcaaaaccccgtctctactaaaaatacaaaaattactgtggtggcacgtgcctgtaattccacctcctcgggaggctgaggcaggagaatcacttgaaccaggaggcagacattgccatgagctgagatcacaccactgcactccagcctgggtgacagagtgagaattcatctcaaaaaaaaaaaaaaaagaaaaagaaaaaaaaggaaccattattactaatgccatggacattaagaggataatttaaaaatatcacgctctgcctatacattttatatcctagaagaaatggtctaacttcttgaaaaactgagcaatcaaagctcatgcagggagaaataaataatagatttctatcaataaagaaattgaatttgtaattactaaccttctaaaaaagaaagcaccaggcctaggtggtttcaatggtgaattttacctaacgcttcaagaagaaatgatacccattttctacaatctcttttggaaaacatacgtagagggattactttttaaactcatcctatgggaccagaattaccctattaccaaaaccagataaagacattataacaaagaaaaactacaaaactaatatacctcattaatatacatgcaaaaatctttaacaaagtattaggaaatcaaatccaacagtgtgatacaaataattatataccacaatcaagtgggatttattccaagtatgcaaaactgatggaattgatggaaatgatggaaatataattaatattatccacacaccagtaggctaagggaggaaagctatataatcacatcaacagatgtagaaaaatcacttgacaaatccaacacctatttatgattaaaaactcacagcaaaatagaaatacaggggaacctcctcaacatattgttttaaaaatctacataaaacctacagctagcattatacttaatggtgagaaactgcatgcttacccctaaagttcagaaaaagataagaatgttccctttcactacttttaattcgacctcacattagaagtcctagctagtgcaataagacaaagaaaataaacacatactgattgagaaggaaggaaagagctgcccttgtttgcatatgacatgattgcctatgtagaaaattccaaagaattgacaaaccagcaacctcataaaacaagtaattatgtcaaagttgcagggtataacgttagtatataaaagttaactgtttttctgtgtactagcaatgaggaattaaaatccaatgccatttacagtagccccaagaaatgacatacttagtatataaatctaagaaaaatctgtgggatttatatgcagaaaactcttaggaaagaaatcaaggacctaaatgcagaaatagatatttcttgttcgtatatttgaagactcaatattggtaggatgttaattcttctgaacttgatctatagcctagccaaaatcccacccaaagtctagcatgctattttgtgagtatccacaaacttgagtctccaatttatctaaatagataaaaggcctagaatagccaacatgacagtgaagaagcatagctaagttggaggactgacactcttcaactttaagacttgctataaagctacagtaaagtagcatgtaaaaagtacaatccctgtactttttacatggagaaaggttgagtctatctctggggaccccaaatgctgtaagttatccctgaaacagattaatagagcttgacagaacaaaaatagtttggagaaaacaaatctgaagtcgtatttgcttccatcccttgaaaatgaatagatccagagaaagtcaagtaataaaaatgtatatttgtactgttcagagacactcacatgggtaataaaattaggagaaaaccaggaatgatcaacataaaatttaggatagctatgatctgagagtagaagaagaggaaagtaatagtgggtcatctaggatttcagcgatgctccatttcactcctgggtggtgagtactcaggggtctgttttattaatatttttaatctgcttattcacattttataaactgtcttacagtattttacaaactacacagttcaggttttaaaaaaactttctcttcttccctgagactgctgcaatatattaggttaaaccaaggtcccacaaatgagttaattttacattgcaaaggacacacaaattttctatgtgttggaagttctttcctgtttttgattgcatgcttttcacccatacattttcttcttaattcttcaagagaatgtggaccgtggatgtgttgcttctttgtttggttgcagaggtctgagtcttcaactgtgttttgaagcatgcgtatagcacaaacagcattgcaaatactttgcaaggagaccctgggggacaacagtgcaccctatccccattccactctttttttaaagaaggaagattgactaacttttgagcatcccatccctagtggaggttggaggagtatctgaggacttaaaactgtgcatttcatatgctgctgaaatgttatgggagttttatttcaaaagctgagggctctgcaagctaggtcttctgaggaacatggcaaactttgattccagctagaaatgaaatggaatgtgtgaaataaaggagttgccaacagtcttatttttctttccatatatcgcaatgaaaagggaacctgtttgcagtatttaacatggaggaaaccaacatttccaagtgttatcgagcacaaggtaatggagaaaggttgagtctgtctctggagcccccaaacactgtaagttatccctgaaacagattaacaggagttgacagaacagaaatagtgtggaggaaacaaatctgaagtcacatatttgcttccatcacttgaaaatgaatagacccagagaaaatcaagttcagctcatatacttagcacctacctcagctctgcattcaaattgggctttattttctactaatatttgttcttttgacaaggaatatttccttacaatattcagtgttatatcactcaaagtccagcatacgtttcccttattttaatgtgtccataatgaacacattcacataaatgaatttcacgggtgaataggttttattgtttatagaacagctgttaatagagtctacagtccacaggaagaatgatgttatttgaataatattatattctgtgtacacatcgagtttgtttccaatagatctcaggtggaatattttatgctttcttcttctttgtgaatcataggaaaagtatgctgaattattatgttgatgtaatgaaaatacctctgtgtgtgtgtgtgtgtgtgtgtgtttgtgtgtgaatctggaaaagtaagggaataaacaagcaaaagcaaaaaaaaagtgagcacaaaagcgcagtgttgattgtattaaatatttttcattttcttttatttgttatttgttaatgtatgctttgaaatttctgtattgagagcattgctaacactagaagcagagtatctgtattatacaaaatgttaagattaaaaaaagataaagtaggaaggaaggaacacacatgcataaaatgtggcatacagtgctaattagatttcatttttaagaaatgtagcaatttctcattgatggataagtttgtttgattttcctaatattggctgtaagtttttttttaataagagaaatttgatgttgagtacataaacatattttgcataaaaggtcagatttctgaattctcattaaaaatttgtacttttggcaaaattgcatttaaatttccatgaagcatcaattggctaggggtcactcacagctgtgcctttagaagagctatccactccccttcaccatagttcccaccattttcctgttacttaccaacatgcagccctcatattagtctctatttcccatctcttttgcatttctgctgccaaaagcacagggatgggcaattgtctcaatagctggcccaaggacaggttaaaaaaggagtttgtaatcacggaggactgtaaagaagaaatagccctggacagaggtttggtgagaaagagtattggtaaatgtgggcctctaatccctgcagggtacacagacaacattagcattgaggctctcctaggaatgatacttgattttggtgaggggcgtgtgtgtgtgtgtgtgtgtgtgtgtgtgtgtatatgtgttcacatacatgcttatgtatgttatatacaatttcaaaagtattacacgtttatttgagaaaatttggaccaaaaataaataaataaaagttacccaaattccccacctagaactcaacatgattaatattttggtggattcccttcttgttttacttctttctttctttctttttacaacttttcacaaaactaaagttattttttacttgttttacttgaaaatatagaatttaacaggtccataaccttaagccttctgcccacattgtatgtgcttcagttccccagctactcccagctgttccccttttcctccataaatcatgaagcaatgggcatttccatgcatcagccctgccgttgacaatggggccgagaagagcacaggctcttatcctgcctgcgtgatagatagcattgagaagttctgagtttggatgtcggttctgacttgcctcaattcttctaattttatgttcatttgttagatggtaattatgagtccctacttcacagggttttcggaataagtgagaccatcccagtaaataatttagaacagagcaaatgtaatcagcgttcaccaaaccaaacaaacctgtgattgattgctgcatcaaaagatggcaaaagacttttgatagctctattgccaaattgtcttccaggaacaacctgccagcgtaaacatttacccgtcatgcgtccaagtactctctttgccgtacattccccaactcttgaaaatattttctaatgtacatatttttcaaagtggcagtttaacatatttattcaatggctgtttcaacttgctgtgttttatcattactgacttcaacattgttatatatttttagctatttgtgtttcttctcttgtcactgctttttcttattcatccttatgatttttgtgtggattaataaattacctttatgtaatgggattaacatattctgtcttgtaaggcaattattttgctaagcatgtggtatgcctttccatttttacagtatattttaaaataaagtattttatctttaatgtaattaatatgaggttaataatataatttttttctttaaaccagggaaataatttcttgaactatggaatataagcagacataattctttttggtttcatttttatcattaaccgcaatcaagttacatgttgatgttttatcttctattggttttattttgctttgctttatttgtttatgcaaactgagaggtcagaacatgtcttaatattccaaatagtaaacaatagcccagttacaatgtattggataaatccccactagcctctccaaattaaatcaccacccttaagcaaaatcaatggctaatataacacttgacttctttagcatctttaatgttataattttaaaaactgaatatttggctctaaattccagtttttaacttttcttagccatttttaactattcatcctacaacataaagtttaaaacacttttatctacttgcaaaaaaatactatttacttttaattaaatctacaaattaatcattgtgaaattgtcatctttatagtattgcaaatttcttcctagagaaagaggatgtaatgtcatttatttactgatattgaccttgtaaatttcttattaaatctatttttcactttttatttgtgtattaactgtagtatctacatttacttcattgttaactttttaaaaattttattttaaattcttatggttacatagtagatgtatatgtttatggggtacatgagatattttgatacagtcacacaatgtttaataatcacattaggacaaatgaaatatccatcacctcgagcatttattcattgtgttacaaataattcaattatactcttttagttactttaaaatgcacaataaattattgttgacgatagccactctgttgtgctatcaaatactagattgtattcattctatccaatgtcatttttgtacccattaaccatcctctccccaccccaccccactcccaccccactcccacccgactacccttcccatcctctgataaccatggttctactatcttcatgagttcaattattttaatttttaactcacaaataagtgagaacatgcaaaatctttctgtgccaggctaattctacttaacataatgacttccagttctatccatgtcgttgcaaatgacaggatctcatttttttttatgactgaatagtactccatcgtgtctatgtaccacattttctttatcatttgtctgtggatagacttgtaggttgcttccacatcttggctattgtgaatagtgctgccacaaccatgggaatgcagatatctctttaatatacttatttcttttctattgggtatacctagcatccctagggattgctggatcatacagtagttctatttttagtttgtaaaggaacctccaaattattctccatagtggttgcactaatttacattcccacaaacagtatacgagggttccttttcccccacatcctcaccagcatttgttattgcctatattttggataaaagaaacattttgactggggtcagatgatatctcactatagttttgatttgcatttctctgatgatcaatgattttgagcaccttctcatatacctgtttgccatttgtttgttgtcttttgagaaacatctgttcagatcttttgcttattttttagtcagattattagattttttttcctatggagttgtttaagctccttatatattctagttattcatcccttgtcagagaggtagtttgcaaacattttctcacattttatgggttggctctttactttgttgatctttactgtgcaaaagctttttaacttcatgtgactccatctgtccatttttgctttggttccctgtgcttgtggggtattactcaataaatctatgcccagtccaatggcctggaggttttccccaaagttttctcttagtagtttcatagtttgaggtcttagatttaagtctttaatccattttatttgattttcatatatggtgagaggtaggagtctagtttcattcttctgcatatggaattcctgttttctcagcaccatttattgaagagtgtcctttccctaatatatgttcttggcacctttgtcaaaataaatttactgtggatgtaaggatttgtttccaagttttttattctgttccattggtctatgagtctgtttttatgccagtaccatgctgttttaattactatagttttgtagcataacttgaagtcaggtaatgtgattcctccagttgtgttctttttagtcaggatacctttggctattcagggtcttttgaggttccacataaatatattatgatttttttctatttctgtgaagaatgtcattggtattttaatagggattgcattgaatctgtagattgttttaggtagtatggacattttcacaatattgattcttccaatccaggaacatagactgttattcatattttttgtgtcctcttcaatttcttttatcaatgttctatagttttcattgtagagatctttcacttctttggttaattcttaggtattttattttatttgtagctattgtgaataggatttttttttttatttctttttcagtttgttttttgctggcatatagaattgctactgattttgtatgttgattttgtaccttgcaactttactgaatttgcttcagttctaaaaattgtttggtggagtcttctgttttttgcaaatataagattctatcatctgcaaacaaggataatttgacttattttccagtttggatgccctttatttctttctattctctgattgctgtaagtaggacttcctgtactatgtttaataacagtggtaaggccaggcattgtggctcacgcctgtaatcccagcactttgggaggccaagacgggcggatcatgaggtcaggagatcaagaccatcttggctaacatggtaaaaccccatctctactaaaaatacaaaaaaattagccaggcgtggtggtgggtgcctgtagtcccagctactcgggaggctgaggcaggagaatggcatgaacctgggaggtggagcttgcggtgagccgagagagtgccactgctctccagcctgggtgacagagcgagactccatctcaaaaaaaataataataacagtggtaaaagtgggcatccttgtcatgttccagatcttagaggaaaggctttcagtcttcctcacttggtataatactggctgtgggtttgtcatatatggcttttattctgttgagatgtgtttctactctacccagtttcttcaggattttttttttaatcatgaagcaatgttgaattttatcaaatgctttttcagcatcaatttaaatgaccatatggtttttatccttcattctgttgatatgatgtatcacactgatttgagtatgttgaaccatcctagcattcctggcataaacaccacttgatcatgatgaatgatttttttaaagtgtgttgttgaatattttgttgaggattttttcatcaatgtttatcaggaatattggcttgtagtttccttttttcagtgtgtctttggtttgtaataatggcctcataggatgagtttggaagtatttcctcctcctctattttttagaatactttgagtagaattggtattatttattccttaaatgtttggtaaaattcagcagtgaaaccattgggtcttggactttactttgatgggagactttttattattattattatgacttcaatctcattatttgttattggtctatacagattttggatttcttcatggttcaattttgctaggttgtatgtgtctaggaatttgttcatttcttctaggtttttcaatgtattggcatatagttgctcatagtagcctctaatggtcctttgaatttctgcagtgtcagttgtaatgtctcatttttcatctccgattttactcacttgagtcttctctcttttttgcttggttactctggctaaagttttgtcaggtttgtttatctttccaagaaaccaactttttattttgttgatcttttgtatagttttctttgtttcaattttatttaattctgctctgatctttactatttcttctactaattttgtgtttggcttgctcttttctagttctttcagatgcattgttaggttgtttatttgaaatttttctacttttgtgatgtaggcttttatagctataaatgctcttagtattcctttcactgtatctgataggttttggtatgttgcgtttccattatcatttgtttccagaaactttaatttttttaaaacttcttcattgacaccactgatcattaatcagcagtatattgtttaatttccttgtgtttgtatagtttccaaaattcctcttgttattgatttctagttttattcctttgtggccagatgagatacttgatacaattttattttctttgaatttcttaggacatgttttgtggcctaacatatagcctatcctcgagaatgatccatgtgctgagaagaatgtgtattctgcagttgtcacctgaaatgttctgtaaatattgattagattcattcaatctatagtgcagattaagtacaatgttcctttcttgactttctgttggcacgacctgtccaatcctgaatatggggtgttgaagtctccagctttcattgtattggagtctttaactttagcactaatacttgctttatatatctgggtgatctagtgttgcgtgcatatatatttacaattgttatatcatcttgctgaattgacccctttatcattatctaatgatattctttatatctttttatagtttttgtcttagaaactattttatctgatataagtatagctactcctgctcttgtttaatttccatttgcatagaatacctttttccatccctttattttcagtctatgtgtgtctttataggtgaagtgtgtttcttgtaggcaacagataatttggtctcgttttttcatccattcagccaatgtttgtcttttaattggagagtttaatacatttacattcaatgttatgattgataagtaaggacttactcctgtcattttgttatttgttttctggttgtcttgtggtcttctctttcttctttcctgtcctccttttagtaaaggtgattttctctagtggtatgttttaatttcttgctatttattttttgggtatctgttgtatgtattatgatttgaggttaccgtaagacttccaaataatatcttataactgattattttaaactgatggcaacttaacactgattgcataaacaggctagcaaacaagcaaagaaaaaaatgaataaacactctacactttaactttatcccctgcttttaactcatttttgtttctatttatatcttattgtactgtctgtgtcttcagacgttattgtagttattgtttttgattggttcatcttttatcctttctactcaaaatgtgaataatttacccaccacaattgcagtgttataatattctgtgtttttctgtgcactttctattatcaatgagttttgcaccttcagatgatttgttattgttcattaatgtccctttcttttagattgaaaaactctctttagcatttcttacagggcaggtctggtgttgataaaaatccctcagtttttgtttgttggggaaagtctttatttctccttcatgtctgaagtatatttttgctggatatacaattctaggataaaagtttctttctttttccctttagcactttatgttatgccattctatcctggtttgcatgtttgaagctccattttgtagtatttttttcttttcttttgctgcttttaggatctttttaaattatttacccttggaaatttgattattgaatgtcttgaggtagtcttctttgggttaaatcctggttttctataatcttcatattcttaaatattgatatctttctctaggtttgggaattttttgttgttatcccttttaataaaatttccatccctatatctccctacctcctctttaaggccaataattcttatatttgcccttttgaggctatttcctagatcttgtaggtgtgctttactcttttttcttttttgttctctgactatatattttctaatagcctatcttccagctcattaattcttttttctgcttgatcaattctgttctaaagagattgtaatgcattcttcagtatgtcaattacatttttcaactccagaatttctgtttgattctttttaattattttaatatctttgttaaatgtatctgttagtgttctgaatttcttctttgtgttatcttgaatttcacgtgtttccccaatatggctatttcgaagtgtctgtctgaaagctcacatatctctgtctctccaggattggcccccgatggcttgtttagttcatttgttgagatcatgttttcctgaatgatcttgatgcttgtggatattcactggtctctaggcattgaatagttaagtatttattacagtcttcacagtctgcacttgtttgtacctatcctgcttagaaaggctttccaggcatttgaatggagttgggtgttgtaatcgaaactgcagtttgatcactgcagtcatatctgcattagagggcaccccaagctcagcaacgctgtggctcttgcagactcatagaagtaccaccttggtggtcttagacaagatctggaagaattttctgggttaccaggcagagactcttgttctcttcccttactttctttcaaacaaacggagtctctctgtgccaagctgcctggagctggggcatgggtgaaacaagccaccacttcttgacctctgtgaccaccatctctgggactgcactgcatcagacctgaagccagcatggtactgggtctcacccaaggcccatagtaaccattgcctggctactgctgatgttttctcaaggccctagggctctacaatcagcatatgggaaagccagccaggcttgtgtcctccccttcagaacagcaagtcccccctagccctgggtaggtccagaaatggcatctgagagccagggtctggagtcagaaaccttagggatctaacttgctgtattatactaaggctgagctggcacataagccacaatacaacttctttcctactctttcctcctctttccacaagttgagaagtctctccctatggccaccaccagcccaggcctatggcaaacactgcctggctacactgatgttcactcaaggcccaaggactcttcagtcagcttgtgatgaatgctgccaggcctgagtctcttcctttagggcagtgggctcaatcctggccttgagtaggttcagaaatgtcacctacaagccaaggccttgaatcaggaacccccatgtccctgcttagtcctctaccctactgtggctgagttggtacctaagctgcatgacaaagtcccctttactctttgctctccttttctcaggcagaagaagcctcttctcacagcaaccatagcatgggaacgtgtggatcacatttaacccagcatgtctctgagtcttacccaaggctcacagtgagtactacctgggtatcactgctgattatttagggcccaagggttctcttgtcagcagatgatgaatctttccagaactggatcttttccttcaaagcagcagttttcattctgccccagagagtatctagaaatcctgtcatccaggagctagggcttggaaagtgggcctcaggagtctagccggtgccctgtcctaccatgactgagctagtatccaagttttaagaaaaagtcttctttattcttccctctcctctcctcaagtggaggaaaggagcctctcctgaagctgtgagctatgctgcctgggatggagaagtacaagcacttccttagccaccctggctggtgtctcactaggtcacgtgtaccccaacttcactggctctgagcccagcatagcaccaagacttgcccaggaattgccgtccttgtggcctaggttgcctttcaagtttgtttcgaaccccagatcaggttagctgtcaggaactcagattctcactgctaggacgatgatttccctctcactaaggctagtctaaatgctttatccatgactgctggccgagttctgcccatgttgctttccactgagccaggagaacactgaggtccaacataaagtcctacaatcactgcactctctctctcccaagcacacagattctgtctctgcgccacacagccactgctgggggatggaggagggatgctgtcagcaattcaagactgtaatttctaccctcttcagtgcctttttctgtgatacacagttaaaatcaggtactatgatcactcacttgagttttagttcttatgaagatgatattttttgtgaatagttgttcaatctgatgttcctatgaggaggaggattgatggaggcttctattcaaccgccttgctttccctctccctaaatctattttaaacattttatatttccatgtctgttgtaaatatgacctttctttggtcacattttgtaactgttttggtcaatacatggtagaactattaatttttatttttcacttttgtaactcaatatattagcggacactagttatttttatactgtggttttactggccttttaagatgcacaatgtgatctgcaaaactaatttaatcttctattcctgataattgtaccatattgattttttttttattttattgtaagggatagattttccaaatgctgtaaggtagtagtagtaacaatgggcatcatagctttccagttcatgttcgaactgaaaacatggcacaatatggcacagatcaatccaggcctaaaattggaagtcagatatggcatcaactggctgtgcatcaagatttaagtatagagtattatttccattttatttgtagtaactggaaatagggaacaatcaatatcagataacaatggtttgattaaattgttgtgtagccataagatgaaagtttttgtagtcactgtaagtatggctttcaaagaatttgtcatggcacaggtaaaatttctagatttgcaagaaaaattgaaatgtgagctatgacataagaccttgagttctaatcctgtccagtcctcaacagcagtccacttaaccctctgtgactcagtttccttaaccctcagtttcctcatttgttaaaaggggataataatactgtgtatagtctatggttttcacagctataaaataacacactgtgggtatacctgacacatagtagatggtcattaaatcattagttgataactattcttaccatcctgtaatatgcttcaggtctatgacagaaaatgcagtaacctggaaattgaattttgtttttcttattggtggactttgaggcaattccaaatattctccttacattttcttcagtattttccacaatgtagccttatttttaaaaaaatataatctgaaaaataaataaaagcaaaagcagatacttttactgagtgaaggctctatgtcaggaggggtcatgggagaagaaggagatggttttgagtcagaggaaggggctgggacaaggggcagagtgcagagtggagagggtgagggagacgtacagtgtggatgttgaggctttattcactggatggcctgagactcagcttcctggcttcaggcacccaatcctgcacagggtgggcaagtccagcagttgagctccagaggtcagcaggacttcaaggcacaggtggagctgagcaggggtgtgattaaagccccagatctggatgccatgccccaggcttagcatggagagtatggagctgcaggattccaactccccaaaagccaatagatggatatgctggatgataatattatctgaatctctgtatttatcccattgctgacattttgtctgtgacagaatgctttatgttcttttgagattttttttgcatccttatttgtctttttcctctatttatcttcccgtagatgatttcagaagttttttcccctctaagagtcattctgctttattttcacatttccattaattatttatcaaatatatacttttatacaaccagtttcttcatttctatttgaatagtcttgtttctttatagcatgtttttcagttttgcagaatactgcattctaaaaggatataccaagtaaattcacacatatccagtatttatcctgtttcatcagatatggttgctttggaaacacaggaaatgacgtggcagatgcatcagaaatctattcggcatcattgcacttaatgattcagatgctgtgaaaaatgagttgcactgattgcaaaacccaatcaacacatacagcgttgttttaactgtatttctaaaatacttagttcttttcgcggtaatgataaaacatttttattgaagaaaatatgtggtgcaaaaaataaataagaaaaagtcgcttattatcccaacattcaaagataaccactttcattattttataaatttgctttttcccattcaaaaatactttgtttgcgtaaatatgtgtttgcaatttttacataatcagaaagcatccacagtctttgagagatctgtgtgccagattgaatgaatgtttcatacagagtttcagtcatagaaattttgctagatcttaaactggttcaaagagagtccccaccccctgctcctgaatagcagctagagcagtgcctggctgatggtcaggattcaggaaatgtttgatggaagaatgaatgaatgaaccatgacacttaaatcagtaaaagccatgcatgctagatatgatcagtaatttgtcagtgctgccttaaaaagagaggcaacccttcagaaaaagctggcctttatcttaggagaaaacattaaggttagtgaacaatgctcggacttccataaaaggcagagacaaaggttctgagggtacctctgctcctgaatttatgtcagagacgcctgtgagaacactgagaacaatggtctggctacttattgggatgaggagtccgaaaatatgaagaacaaaatacaaagtaatatctcaataaattatctggcctcagcagttctccaagccaatttggaatctgtttgtttgaagctacggggaacatcacagcttctaaacttaggaaacagtgctgagttttggaagcggatccgtcttgacaggcacggtccctgccttgctgggattccaaagaagaattgatgaagttgacaactcacttggccatttgctcctggaggagctggtcctgctgtacggagaagatgagcaaatgtagactacatttgctcagaaggaggctgccgtgtgaaggctttggggttagactgaccggggtcacattcagtgatgtgtgactttggacacatctcttgacacagtcatacctcaatattcccatccatgagacaggatgtgcccttacggctcaggcaggattcacgggtgacgtatggtttgtagggcacatagcacattcttcaaagaccagttccttccttcccctgaaactcctctgtttcacttcgcagtggtggctgggttagggaaacttcctcgagagcttgtgctttgtgatttaaaccatgaactcttgcagaccttccaaattgttttgctttgcaggtacaacaagatagatagattaggtttaattttgtttacagcaaataatgtgatgactttttttttttttttacagtgggtttcaaagccacttcaaactgcctgcaaatggtggaccccaatcaaagagttagtgaagtttttccttaaaataagactcccaacacatccctcactctgtgtggggattaggagtcttagtagaaactgcgtatgacattcagccagccacgctagattcagagagatttcacagcagttgaactctctcctcctgacatctatgcctgaaagcacagatatcctagctggttaaagggcagtatgcattgcttcttccaggaaaaggccaacacctcccactgttgaaagtatcttcacactctcaattcatcctaatgcaaactaggacggtggcagagaatgccaacagcccggccgtcttcctggaaaactggtctgcatggaaggagcatgatctcccctcttgtcagaagggctcatggaggtcaaaggtacttggagtttgtgaggttcccatgatcctgtgtaaagcaggatgcgagttcattcccagtaaaccaagcctgaaggcattctgtgccctgtgtctccctgccaagacaagagagctgaagccacgtggtggtatgggtgggctgctggccatggctgaaccagttgtcatcagtgccatggtcttcatcattgtcttcgaagcagtcgttcatgtaaccaactctacatcagatactctagtgttttgcaaaatgcttgggctcgaaagcccaactcctggttagagtcctgcctttgtcacctgctgactatgtgacctcaggcaagctacttaccctctctgtgcagcaatgcactcatctgcaaaatgggcaaagtaatagtaagtacttaattgggctgctatgatggaataaatgatacgaagcccacagaacatttaaaaagaggcaatacactaaacagtgatgatttctataatctcacacaatcttataatagccccatgagttaaaggctatttttattcccatttaaaaggtacgtgcttaacacacttgattctagggactggggatccacttaagaatcacaccaacagtctttgtcctcatggacttttcattctaatccatgagaacaatcatcaacaggaaggcagatgagctcatggcacaatttcagctcttaagaggtgccaggaaggaaggtggggcaggcggtctcctggggagtcacaggaagggggacccatccaacagtgcagtcagaggaggaatctgagggtcatccatggggctatcagcaacgagtgagctccaggtgacaggagtgacagaggaaacagcacatcctctgtccaggtcaggggggccctggggctgagcttggggacccaggggagagtcttggaaaataaatggggacacaggccaggagcagatcagagagttcccacccaggccacagcatgcagagtttattctgtgagtgatgggaagccactggagggtttgagccatggtcaggggtgttaaaaagaaccccgtgttttcttgggaatggagggcctgagtgatgcctgcaccaataatggtggaccctggagagggaagaaagactcaggattgaagacacatcttagctgcagaactgaaaggtcttggcctttactggatgcagacaggaaggaaaggtgaggcttccagagtcttcccagctttttgccttcagcaggtgaaacacttctgatctcctccacgatggcctttgctcttgttagaggtttcagccacaatccaggattgtgtgaaagagttgatatatatgtaacaaaacattttgtaatgccccttctctatcctgagatgaaatctataggtaatgctcaatacctattacgtgtaatttaaaaaaaaaaaattaaagccctaactgtgatgtaaggaagaaatgaaaggaacataataggtattcaatatttaaatgcttggtatgagggcatgagaattttaaaatgcaccccccccatatcaaaatcacctccctgggatgtaacaccccactgggaacggttgatgccaatgaaggataaaacagcaaagcaggaaacccaggggggtgagtaccgcatctgatcacattcagggcaatgaaagccattgcagcagcagcttccacagctctgggttgcccaggcctccctgctcacttgctttagtggaggaatggctgcctccgaccaattagtgtattgaacgtgttctgtgccccgcaggatgtgtggatgacaggcatggccgtggctgagagcattggagaggtttgttcacagcgctgctctcaacctgcatcctctcctcaactgaatgtggagggttgaagagtagaatgtagctcttcccaccaccctggagcctcccttgtgtaacagggagctcccacattttcaagatagaaagacacagtcctctaatgcccacccatgctgggggcttcccctgtgttctgtcagctgggtcacagagagactcagtcaacaagactccatccaaaacatccacccgggtctctgcccactcaggaacattgttcccctgattttctcagaaaaccttaactttttgggtttcttttttaaaaccttgtatcaaacatcccttttgttctcagtcaattcacatgtgtttattcaggttcccgtgttgtcttgttgattatgttctgcttagcaaatgtttactgagtgcttattctggaggaataaggcaagcacggacccaggagcaaataaggagatgtctcctcactcaaggggggtcacaattcacaggccaatcctggcaggaatgtgcagcacaaggaaggatggctgagcgctgagtgccggccgggctctccaggtaccagctcccacatgggatgtgcctgttcctgtgagcaggtttgcccccttcccatcccgacacaggatggcaagtcttttggggttgggatcaaggaagcaagtgttatttttatacatatatatatatgtatatatatatttttttttttttattatactttaagttctagggtacatgtgtacaacgtgcaggtttgttacatatgtgtacatgtgccatgttggtgtgctgcacccattaagtcgtcatttacactaggtatatctcctaatgctatccctccccgctcccctaaccccacaacagggccccagtgtgtgatgttccccttcctgtgtccatgtgttctcattgttcaattcccacctatgagtgagaacatgcagtgtttgtttttttgtccttgcgatagttcaaggaagcaagttttaaatgaagtggccttgctctttcttcctctccctccctccctcccttcctgttttccttccttcctccttcctttattttttccttagaagcataattgagtttatcagattcttcagctcatatcatctttaccaattcatgaaagtctatttttattttattatctctatcatctaagaaccccgcctctgtccctcttctccttttcaacaccccctctaatgtgttggatgcatgcccataaactggccatgcagccttatcaaatataggggattattgtgctggggcattgtgctctaaatctcattttgtttctgatatttttcaatcagcacaacatcttagaacaatacgacattgctgctgcgtgcatatctattctgctgctcctaactgctgcatagcattgcctggtatatatcctctacattacataaccccaaaaatggatctctagttcaccttcaattctctagcaccccaaacaatgtggacggagcacctgtgtgactttttaagaacctgtctgtgacagccagtttacatgtgatcccaggacaggggacaagggagcaaattccatctcaactggagcaggtggcccggagggagcaggcatgaatgttgttgcagctgctttcgcctcatactcatgctatgctgtgtctgtttacttgtgtgatccctgccctcccaagatgaaaatgtaaaattccatgagaacactgacttcagtggttcacagtggataaagaaagaaacttcaattctttagaaagcagggatccctctaataagtgccatttttaggagctgagctctaaatctcattttgtttcttcaaagaaatgccccagtacaataaccccatatatttgataaggctgcatgacttgtttatgggtatgcgtccaacatattagagggggtgatgaaaaggagaaaaggaacagaggcggagttcttggatgatagagataataaaaaaagactttcgttaattggcaaagatgatatgggctgaagaatctgataaactaagagaataaacatgagaggatcctggtgtgttgctctgatctccaatgtctatctttgaagaaatgaaggaagaaatgcatgagggatctggggaacacttgtagaggaggcgaaaccttgagaaaagccagctgcactcctgagtccacctccttggaaagcattcttggagctgaccttgccctccttcacccacacccacccaccctgcagcacagagcgcagagagccccgtgggctggccttgtgcaatcctctctcctttgtgaggaggggagcccctgaccaccagatcttcttctgacacatctcttgtgactccagcataacctcccaccgaagcacggagcctttgggccagttagtgcccctgcacttagggaattttaaaagagctgtttgcatgtgttttccaggttgccaggagcaaagctactgaggccctgaagagctcatcaggtgatgacagcgcctgctgggatgtcagggaaaagaggagctggggccactgggcctctctgacaaacagaaagccaggcctgaaacccgagtagcgtttgtatccacctccctcagtccatgtgtggccgcctggccggctgctgtcttagttcctccacgtggcacttgttgagcacctgtctctggctggaatgccgggtgccagaagaaactctgcaagtaaaactcaaccatcccaggacactggaaaatcaccactgtgatgggccaactctggttcccagtgacattgtaagttgctcccgaatcgccttttccaaggcttaatcggctgaagtcgatgtgcagaaactcatcaacagaactttcagaaaggagaagcgaaaatgggctgccccgaagatgaggtcttgcacctcgccaagtggctcctaaaaggccacttattggaaggatccctgtcttctaaagaattgaaatttcttggccgggcatgttggctcacgcctgtaatcccagcaatttgggaggccaaagcgggtgggtcacctgaggtcaggagttcaagaccagcctggccaacatggtgaaaccccatctctactaaaaatacaaaaattacccgggcatgctggcaggcacctgtaatcctagctaaggaggctgagacaagagaattgcttgaatctgggaggcggaggttgcactgaaccgagattgtgccattgcactccagcccgggctaaactctgtctcaaaaaaaaaaaaaaaaaatttatccactgtgaacaaccaaagtcaccattatcatggaattttacatttttcattttgagggggtggggcagggatcacacaactaaacagacacagaataaaaggagtatgacaggaaaacggccgcagcaaaaagctaagcaggatccaatgctagagggtgacaggcggccactgtcccaggacgtctagggaagactccttcagaaaggcgaggttggagcagaggctgggagctgagagagtaagccacgaatctagggcaagatgccccagaaaggagaagagatgtgcaaagattggaatgtcaggtactggaaggaagccaacaccgctcgacaggatgagggagaggggccggcagggcagggaggggtcaggggcagccagatcactgggagcctgtggaccatggcttgggtgtcggatagggtttgatgaacagcccactgagggtcccgagaagagggtgatgctggactagctgctgagtagtgggatggctgtaatagcatgagaacatttcagggagctgtggaagcacagggcacagatgatggtagctcacactaaggtggggagagcagttggatgtagacgacttttgaggataaatctgatttcaagagaggaggagataggatgtcttcatttctgcagaatctgcttttagagacaaacagcaaaacaaggccagctagatggttctgtaacttgaaaggtaaatctctggatgctggggtccatggcccagatcatcccttcaagaccaagcccctgatgtccctctgcagggcttctggctgctgtcagctgacagctatatttctctaggcattgcacctccccaagacaatggcctcaccctagcctatatcccctccccgggacaacacaggctcagtggctggtctactcagtggtaaaaaggcccagccatgctgcctcaatttgaatgaaaaagaagtgccttccatctccagggtccccttggagattggcgaggcctcctgggcaactgcactgcactttagcttctccctttgcccagcccttctcctccactgtcgggtgttgctgagaacactccctgtgaacctgccacaggaaaatatccacctcccagtctgttttcctgaaacctgacttcagatataatcaactcctcagcggctacaatgcaggtagaggcccatctaattacatcttctgatggaaggtgttggtggggagcagggggagattcacatttcaaatggcaaaatctaaaaaaagaggaaaagcatctcatagctataaatgaataagaagcacctaagataagttttcagatgtgattcagtggtagagaagaacaagctgtagaactttctagtacatggctagcagggctgagtaaataggatgacttgtaacagagccaaaagtgtttggccatcacaaagctctttgacaagatctgaagtccagatatttggccactcatttctgagtcatgaaaatcctaaatgtggttgaatgttcctgtcctttatccctgctcccaggagcatcttccttgttccttttgtagtattcttcagggactgactctccacccccgaaaaatggtgtgccctgtatcaccaaaccatgtgggcagtgtggcctcattgggtctgggggtcttgttgtcctgtaagtgggctggggagctcttgggagactgaacatgccaagcaaatgagagtcctgctgatcacagtggcatggatgtccccaaatactcggtggagagcaggaagaaggagttgttcatagagatgttattttcaataacagagaatagaggggggcaagaggacaggtaagaagcacctgtcagtgacaagggatgggagagcatggggagaacacagatatcaaggaaaatcaaagatctgcagggaaagcattaatgctgaaacccaaagccgcctcctccagcttgtggctcccagcagagagcaggtcagtttcacaccacttttcttctctaagcagcagtgatcactggtgctagagcccttgacaatggcttgtccaggggaggccctgcccttggccttagacgagacccccaagtgctatttggaaagctggggatttgggtttcacatccaggagaaagggccctgttcaatggccatagttggattaatgcttagggctgtggtgatggaggggaggagccagcagtgtgcctgacagagcaaatcacccgcctcaagggattctgaaggaaaggagagagccgttaaagaaagcacgggcagcatagcctgtgctggagtctcctgggatccagaccaggaacacacatttttaacaagatccccagatgattctggggcacaccacgttcgagaaccgctagatgaagggctctctcccatcttgtgagtcttcacctcttcccataaaaaaccgagattgttttgttcttctctctctgctctccctattaggattaccttaagccacggatttttgtcataatttctatccaaggtacaccacccctttgagaatttaaccaacgaacgaaacccccaaattccatttcaaatctttcttatttatttgcttcaggaaggtaggccccaattggccattaagaaagtgtggtgtcatttacttaacgggtcctccggatttatctagctggctttccagttaaatgcaaccagaggttttcattcaatgtcacagtacattaagctaacagtttcatttcttcccagacctaaaggaacaatgtatttattaaagcattttgatcctttggagacagattaatcagaagcttgtgtcagttttgtatgataaaatgagtcaataagcagaaatgggcattgacattacataaactgaacacgagtggtacaatgcatatttgtggtgtcacagagaaaaattaggaaaaattttgcagtattccattatcattattaaacgattacatctcagttttcaggctgtgtgcaggtgggggtgtgtttgtttgtatgtatttgttatgggacagatctattttttaaaaaagaatagtggatgaatttgaacatggactttggaactaaaggctaatgctgtaagacgtttctccttagctttgccatggctttgacggccacagtttcagtcacagtgtcaaagcaaccacagacaacacctaaacagataggtgaggctactttccaataaaactttatcatactgaaaataataagcagtcagcacattggcctagagaaatgaaacaaacaaaagaagctgacatctgtttgtctccaaaggaacaatctggttttggatctccttatcacaagtctgtttattcactggcagtctattttcaccttggattttagtattttttagtattttgagtatttcagtatttagcatttagtattagttcaactttcaggaattaattcgggaaataggttttttgtgttacacttcttgtaattagagactcttctgggcagatgtttcattctaatgtacccctgtccttctgggaaatcatagagatggtagtttacagccaacggcttcatagtggagaacggtcatttgttttaaacactagtcagtccctgacatttttctcactttttaaaaaattaaacaatttgagtaaaatttaattgtgttaaaatggagattagcatgatcatttaatataagtagggaaaggtcttttattttgactagggaactctgaaattcaataaatgacaaagctaattagataccaagggcgagtgtctgatttgttaatcctgtaactgaaatgagacttgctgggaacactatcaaactggcggttttgaacttccaaaaagcgcattcctcctgttcctaacttaaggaaaaacaaattcagaccgagtgttactatagaaagccgaatctctctcttgttctgctaataatgaattattattcatgctcgaagccaaaattattaacctcttaaattatatgcatcaaaaggagatgactctatctaaaaccaggaacaaaattagatatgggtgatagtgtctctggctgtctaatgacaacccgctcccttcctaatttaattagcccactctccggaagcaggaatcaccaagctgaagagctgtgtgtgaaggcttctccgtaaatgtgagtcaaacaacgtattcggttggtgcaaaggtaattgtggtttctgccattgaaagtaaaggcaagaacctcaattacctttgcagcgacctaatacacgcccaccatgggtttcctcctggggacacacagctgtttagcagcccagccttcgcttttagttaggagctcagggaaggaagtaggagaaggctgggagaaacagaaagagagagtttaatccatctggaattcaggcagccccttccctttctatggataaaccacactggtcctccctctgcaggttgaggcggaatctgtgcaccaacgaatagtgacaacaaatatctggctcgcaaaacgctttcacagatatactgttgaaggcccatgaacacttcatccaggagttattattgtgcctaagttacagagggagaaaaagaggcttagagagtttggggagtttttgggggaccataaagaaaatcccagaaaatctaacgcagctgggtgcaaagacactgggtacattttaatcacaattgggtttggccaagcgctccctgggttcaagtgtgctggtgacaatgacttaacagagtctgcctgctcatttgcttgttttccaggcaattgctttcatggtgtcagcagctctcacatcagcgctctgggcctttctttttcctcttggttacaaggctggatgcattactgtcctggactaaattggagttgcttagcaagcaggaagacaagggcggggagggttcctatccagccagcagctctcagtgcttgccagaacacagcaccagccttttaacctgagacggtgtcgttgttggaagccttggattgaagccacttccaacagcacaccatctcctgatcacaggaagcatctgtgggctaaggactgaagcctctttggcacaaaagtcacaaaaatgctctccagttatgatgtgcgaaagttctatattttgtgcaatataaagcaacagacataggaacaggtttactgagacacaatctctttgaagaacaagttcctgaaagaaagctgaaagtttgccatcaagcaaaccagcagaatttgtgtttttatagaaattacatatctgggcagaacccgaggaagagcagcaaagtcactgcatcccttggctcctcccaacggggctggttggcaaattaaaaacgagatgaggaagggttgggacaccacatactccatctgttcctcacagtgcagggctaatatatgaccaggctttggtgggaaaacagcccaggcacacgctgcctgtcatgtccctctgtgggcagaggccaacaaggatccagacctctggactggaaaggcagatgtggaagaagtggaagaactgtgacatcctccagcgttttgtcctacagggctggctgtctctttcccctgttcagtgcccatggatcagacacaggctctgtattgacgacgctgtgagcacgtaggcttcatcatcatgtcaacaggtccctctttcctcagcttttcttctttatttgctgtaagagcataattaaaacaataaaatgcctcctggatatttaatgatgtgacaccaacactggtgatacatggtgttacagatacttattagagaccacacgctttacacccctttctttatgtcattggatacttgaaagggccctctgaggaagagggcgtatcataatcataggactaacccataggacccagttagtctggaacctgtttccaccttttgccgtgacataatgacacattgtccctttgtgctcttaaaagcaccccagtttgaaaaacaacatgcatggttaccctattgtggccacactttgtgtgccaggaagttgaagaccagaggggataattgcccagagattcacagggtaagaggggccaggcttgcagtttagctcaggggttcctggtgtcacaagcaagaccctgagccgggaattgtgctcccctgcatgtcccatgagggcgtgtgaagcagggtggcttgcagacgattgtagacatccaggaaggcccacctgcagatggcgaaagacaagccagagggtcctgagaatccacatttcaacagaactaaataaaaagcaaatgacaattttgagaaattgtgatagcgtgcaaaacacgagcagcacccacctgcacggcctcatccttgccgtccccccatctggctctgcactgggctcggggctggattcagccataggggagctacacctgctcagactaccagccaggtggagaaatgggggggaaaagtgttttaaaggctgttcctctttcacaaaacacaaagtcctacttaggagaaaataaaacttttgatggacttccttaggtttcttttatggttttgtcttctttaattttgaattgtgtatggatgagtgaggggtcctgtgttctttccctacagtgcacattctgtaggtcttcatgaaacccaacctgtatctcagtgaagggagaaaatcctaacaagaggaatttgtactccacagaaggttgcgtctgcgtcaactcaagtcagttggtgaaggctcctcagcccatcaacagtgagcatggtagagctctgtgtgccccagctgctctggctcagtctgaggactgctgatccaatggccgcactcagcgggacacgtagccgaccaaagggtgtggaggaggctccctcagggtggggccccaatgagaaaggctatcctttaagacaggacacataaaataacagagttatcagtggcaatggggcatcttgccttggagtttgtatgtttgagtccataactggcctttgaacaaggcagggtctcctgctttagattgtacctgcctaattcaagacaaatccagctgaggtgtgtcagggcctcctgcttcccagctggggcagtgactacacaaatacaggttgcagtttgccaacttgtgcaaaactatgtgactttcaactacattttaactaggagaaattggcaacgttttgaattctgtgcctaaacctggagttgacttactgttccacttggcattaacgctgcatcattcaaatgcatgggaacacctactctgagagacgctatacatttttaaggtgttctatctggaaatgtcaacacagaactacatggattttctctaagtaattaatttattaccttgactattgctcaggaaaaagcaaacactagaaaggagctgattaaaaacaatttcttctcaagaaaacattgagaagccagaaagagaactcgatgcattccttgagccactaagaacaatccacatgatctgtcagacactaccaggacaccccaagtgtttcccagggagggtttctctggacaagtctgaagggcctctggggtgtccaccattgctctgacacatgcatatgtgatttcccgcaggatccctgacatgccactcctgtctcaagaccccagatgatagacacaacttctttagctgctgctttcagctgagctccaggtccacaaatctaagctcatgttaatttggaaacagaatgtgtgatagttcatttccataggtccactctgctgggccgcagcacccagatatttggtcaaaggttattctgtatgtttcatgagggtgttttgaaggggattagtatttaaatcgctagagttggagtaaagcagatattaccctccataatatgggtgggcctaatccagtcagtagtggctttcatagaacaaagtttggtgtctaccctgggcaaggaggaattctgccagcagatggcctttggctcaaactgcaagtctttcctgagtctccagcctgctggcctattgtataagattttggactctctaagcttccacaattgagtgagacaatcccttaaaatacatttccctgtctctctccctctctttctttcaaggtagagtatggcaagaggaaggagttaccaactttgcaaaaaaagtcaggaaagtctcacatgagtctagaatgtgcttattagacagggaggaagacatcccaagccaggatactgaggcatgattaggaagctgtgagacctttggtggttgataggtggggagaaggtggaagaaattgtagaagttaaggcatgaaaatcagctgaagcaagatcttggcaatccttatatgtagaagacaaactcatcctaatttgcactggagttttctgtttttagccctgaaaatcccatgaacgagaagccccttgtacctgaaactgtcttggttttaaagcagcatcccacatcccgggcccctgtccccgattcctggggcacttggccaccccatctccatgtgatgtgtattcagtcaacaatctttatgaagtacctactgtgtacaagaaactatggatataggcccaatccctgctcttttgttgctgacatctacagacttctaaaattatctgtttatgggtgtatgggaaaaatgaaaggaatcccatggggaggagagtagtgtgaggtgaggcaaagacaagtgcactgcctctgaagatcatggcaaggatttaggtttttattcccaaggaactaggaagacaagaagggtgttaagcagggatgtgacgtagatacttatcagtgttgtgggtgggagtgctgcccagtgcccctgtcccagtaagcaggaggggaaagggccctttgagtggcctttgcatggaatgatgggtgatgagatccacactcacttccccagtgtagggaaggctgtggggaggatggagaagagcgtcctggtgtgtgtgacatggatgaacccaaacctggaggtgatgaggccccgatctcggacttgctggaccggggctctgagccagccaaccttctcggggcttcatatattccacacagaggacaaggcaatggagccaagcaggcctgggtctaattctagcctggccacctcttgcctgtgttggttcacatttctgaccctcagcattctcccctaccccacagccctgctgagaagcccagactagtatatgtggagaccacctacacagcagctctccttctgcaatccttcaacacaccgctgttttatcatcagtaacaaaatggcccctatgtggcctctcaccacgttcttctatggcattatctgacatgaggcttccaatactttgctgagttttaaacagatgattatcctcattttgcaggagggagtgaaaactgtggcccttggtaggtaagtatctgtctgggtcttgggcgtagcaagatgggaagcccccagtttagctctaacatcaaagcctgggcacctttccagagactaaccatgtctcatgatagaatccatggaaataatttgcagggtttcagctacacaggggatgaatctcattttctagccaccataggtttttccctgtgtgtgtggaaagatgcaaagccaactggagcaaaccatccatgctgtactggggctggaagagttcttcatggcaatcagtagattcagggcaggggaccctggccctacacaaagcatttcttcagaaacaacctccctctgagtgtctttctcaaaggcaaaggttggaagggcaagaacccacgtacttactacatcccctttttgcctctaaacattcatgaggacttttatttaaaagaatttggaattgaaggcaggtattcaacccaaaatgtgtgcatgaatgctcataataacactattcacaagacccaaaaggtgggaaccaaagggttcatcacctgatgaagggatcaacagtgtggtgtgtcggtaggacagaataatggccatgaacaggaataacgtcccagtgcatgcacatcatgggtaagcctcggaaacatcatgctgagtgcagtaagctggaggcaaggggccacataatgcacgatttcatttatagcaaatgtccagaataggcaaagctttagagtcagagagtagattagtagttgccaatggctaaggtagagggaggattagggagtgactgcttaagggatacagagtttccgtttagggtgatgaaagtgttccgaaactgaataaacatgatcgttgcacaacaatgggaatgtactaaatgtttctaatggaaattttatattatgtgtattttaccacaatgaagataaaagagtattggcccgaggtccagggtaactctgaatatccaaggccattttttatgtatctctgaactgggttgattgcataatttaatttttaatttttgtttttctttacattaaaaacccatctgtgaacctcaggcctattttcctttgaaaatgactaatttcatattttatgcatgcacaatgaatgctgatgagtcttcatttgtcaccaggcgcctgtgactgtcacaatggttcccctaatataccttgcaaaagagccaatgggatcactaataatgcttgcacacaaaggaggctcttccgcacgccgcgtccatctggcttagtgacctcctttgtgctgcaggtgtgccagtgtgatttatgctcacacttcatgcagtcctttgccaatctaattgcctggccattaaagaggatgagaaaattatgtagacacccagacacatccatctcaggatatatggccgatcagctgctggtggctaaaataatgcagatgcctaataccattttgaatattaatatccaccccaactttcggcaacattataatttggcagtgctcagtggcacttctgcctttccagccaaatgacatttgtcacactcaagtaggaacaattattaataattttcatttcattagaagcactacaataaaatgtcaacagccttaaaagtgcatcagaagtgtacaaattaattttgattttctgaagtgtaattacttttgtaagtaccagactgtgtaatcacgttaggcgttattacttgtgcaatcaattatacttaaatgcacttatctgttttcaaacacgattttcagaggtcacctgttggtggggttttttttttgagattataataggaagagcctatcattcatattggacatgcagtgactaaaagataggtaaggcagtgataagttaaaatataatagcaaacgttgttttaaaagagaccactcccttcttcctatgaattttgggcttaattggttctactttaattgtgggtggggtattacacacagtgactaaaaaatattttcacatgggaagagagtagggacgtagttcatatctactttagattgtgggtgttaaaatcttgggttcccgtatccgactttctgcctagctagccatgtaccattgcttgtgtacaatttgtgaaccaaaaacttgggttcccgtatctgactttctgcctagctagccgtgtaccattgccccacgccttcaagctgcagtctgtttcattcccatgcaggtgatacagtgcccgctttacggaggccatggccttctttccatcattggttatttcatctttattgtgaagcacagtgcagagtagatgcctaataaatatgttttgaatgagtaaataagcgttgtcataaaaattcaatgataagatgtagatgtactcattaactgttagcaagtattgttgttgttaatcatcccactcaatctagtattaataataatcattaaaagcttagaaaaatcaatggattctcttcattttggccaggagaaagagcaaactcaataaacccatggaaagattctacccaccactaatcattaaatacatgcaaaataaaggatgaaatgaatactttcactgcctaaatagccaaaaaaaaaaaaaaatcattaacctcctgagatgtcaaggggtggggacatgggtacctgtgcacacagctggcagcagtgtaaatcagctcaatccttctgaagagtgattcgaccaaatgtataaaaattaaacatgtacaaactctgtgaccaaggaattctacttttggtgtctaagttacagcaatgacaactaggcagacaaatatgtataaacaaaagattcttttcagtattgtttgtttataaaaggaaatcaccatacatgcctttcaataagacactactaaataagttatgatacatccatagaacataattctatgtagcctttaagaagaagaatctttatggattgacatgtaaaattttctaagatacagtcttaagtgatagaacaaaattactatccaacatatatagcaggtctgtacagcattttaaacaaataatagactagatggcataaacctaagaagaaatctaaaaagtaaattatagatcaaacataaactgagttatgaaaaaatgtaaattatatcttttgggggatgggcatgaaaggaaatggttgttacttatttcttaacatattttaaggctggcattatgtgttttgattttttgtgttcataagaaatttaaataaatgcaacaaacttatttaaaaatggttttgaatgtgtgagagctctcttggtaagtaaccaatcaagtcaataaatgaaggatagccaagtccatctgactcaaccccctttctcatttgggctgtgttcccaggcttgccacttaattggctactagctggaattgattagcaaatgtaccagtataaatggaagcctcaggaaaagggattgtcaagttcatataatttatatgaagtatcattttcttaaatttcaacattctcaggagcttccagtaatataattctaataagcaggactgattgactttccaaaaatatggacaaagtcaacaaaattacgtccttgcctcagaatgatttctgtagctgttagctaaatggctgccaaaaagttataatgaaatgttgaaggcctgcttccatggagatgaaaataatgactctagctctttggaactaggaacggaagtggtgttttgttttactttgtagaatcaattccatttgatgtccatgaatgaggcgtccgtctcacttttactgtgttgacttttaaggatctcattttaaaacatcatatcagtaagtaaaattgtaattataagaaaaatgatgaaatcatagaattaaaaagtaagctctatttaaaaaaattaatctactactttaaaataaaaacttgcattgacctgacaacttggttaatgagggatttgccaaattgtttagttttatcgcttgccaagtgtgtaattactttgcttggcactttttaaaaatgttattataaactcttcttccaaagaaaattatgcaacataattattaactctaaaattacacacacatttatctgctagtatttgctttcatgcttcagctgtcatttagacatcggctgcttgaatcatgcacctgttcacaatgatgttttcaatgtgtttctactaatttcccattatatggtagaaagccaaacactgggaaagataaagtaacaaaaactgggctttaataggaaatcacttctcacaaaattggagaccgtgatcacattcacatggaaggggccttttggatctgcatccatctaggtcgtgctactcacggcctgtgcgatacattttcatccatggtgaatatttcaaccagaaccacacttcaaacctggacacacaacggcaagctggcctacatgcaggtagattttgttcttgccttctcttggatgttgtctttgaaaagggcaaaaagaataccttttgtttaatagacagaaggaagatgtccatgggaaaaagcttcatgaaaatgaaaacctgtatttaaaggtggtcttgactcagatttcctgctttgatttccttccatctaatgcatctgctgtctgctaaccaggaagctcccagagctaggcctcacgactgcccagcctccacacctgcacaatactctgctccgaagatgcccgtcagctattcataagtcggctgaattactgtattctcttttcacttcagctcatcagtgaaacagaatggagggactctatgggctgaactgtgttcccccaaattcatatgttgaagtcctaacccctagtccctcagagtgtggctgtagttgcagaaaggaccttgaaggaggtgataagggttaaatgaggtcattaggttaggccctattccaattatcactggtgttcttgtaagaagagcagattagaacagaaacatatacagagaaaagaccatgtgatgacatagggaagagacggtctctgcaagccaaggagcaaggcttcagaggcacctgccctggagataccttgatctcagctttcaagctccagaactacgaaaaattaaatctctattgtttaagccccccagtcaatggctctttgttatggtagccctagaaaatgaatactttgctctactttatagagacctctttatgagaagctgtgggataagttgaactaactccatggaaccatcactcagaattccaagacagaagagaatggatttaactgtggcagcatggtggaaatcatccataaagcagtgccagctcccaaactcctggagattctggttgcctggatgaccatccccaaggaaaatgggaaatgcatagcccatggatcagggtgatatggtttggctctgtgtccccacccaaatctcatgtcaaattgactcccaatgttgaggagggacctagtaggaggtgactggaccatgggggtggatttccttttgctgtactcacaatagtgagctctcatgagtactagttgtttaaaagtatgtagcacatcccccctttgctgtctctctcctgctttgccatgtgaaatttgtgcctgcttcccctttgccttctgccatgattgtaagtttccagaggcctcacagccatgcttgctgtatagcctgcggaactgtgagtcaactcagcctcttttctttataaattacccagtctcaggtagttttttatagcagtgtgagaacaaactaacacatggggcaaccacagctttttttgtaagagaatgtgctcacctggacaacttagacagctttgtggtcatatactgatccctctccatggatcaaacctctcaaaatgtcaaacttcccaaaatgtcagattaaagatctgctgaaattttctggaaattttataattattgggcacaaaagaattctaaaaatgcacaaatctatgcacattggtcttggcctcccaagacttgagaagcaaccgttatcttcttctaaagtatcaagctccagatgttggattagttgccctccttttgcagaagtgtgatgggaggtcaaactccagccccaggagtgttccatgtcgactgatcatctgaggctgaacaggaaagtatttgcactgaaacaggttttactgaatctttagatattgaacgaggatgtatatcactcaaacaaaataaaaaaagcaaacagtattagaattcttgaggcacagtgctgagttatttttacttttacggaacctacacttcctaaattgattgcttcgtttgcctctgatttagcagtagagattcatatttacttctctgggggaaaaggacacaaagaggctttgaaaacataaccttttctttcctgtgacaagtgcgagtttatcaatacagacccactgtgaccaggctctcttgtgttttctaagatattattttgcttttttgctgtatgcctccacagataatccaatgaaaatcacatgcaaatctgcatggtgcattcttagaaaacatttttaggtcccatttgaagaaagagagagacatattttcacttttacaccttctgttcccaaatgaaaacattgacttgaaagccagccttgcaaacagctttccacttaaacaataaaaatgcacagaaatccttccagtgctaccagaagttatgtatccgctatgtagttcaggtgtttgtagccatataggatatatgaaaatacataaaataaaatcaaagaactatattacttttcatattcaaactgatgtagtaaataaaaatatcaagattttctattaaaatattcccttagcacttacagaaaaaccaaattagcgacaaagaaaaagataattctgcttatttgccgttaggtaatgaaagcagactgatgtaagaaaatcatacatctctctacgttgtattcacaagggggacctgcatttttccagaaagaagtcacccttttaactgtaggcaaatgttaacagtgacagtactggttcataggaatagtggaatattcaaatagcgagtcttagggcctcatcattggagatctgagagtgactacaaactataaaccatgagtgtgcatttcactttgccaaatatgttatttttttagagattaactggaaaaaaagataaagtcaggcacatattaatttctgaattcaaataaagtggtataacactatacctggaacaacctcattttaatttccacttggttagacaacatgctcttagacttgcaccttacagttctcttttattatagctcaaatctcacgatgagcagagagatcatgctgctcatcagatagagctgctctaatatcatcccagctctggagatgtctcgcattaacacttcacaagactcatcagtttctgctatctagttcaactcaggaacaaaaagatataccatttcttttagttcatatttaataaatttactgtaaaactcactgtctaaaagaatgcagaaattatatcatgtgcttataattcctggaaaacttttttttaaaatcagcatcatatacttcaagttacagatggagaataaatggagtctgggatgcgacaggagcatttgcagctgctttttctcaaaagcaacattttctgaaatttttctgattttctaaattgttgtgatcacacagttttcaggtaagacaacaaaccttccttttcactaataacttttcctttaggagaaacaattctggggatatattatcccattgttgccagaaaggggtcccaatccagaccccaagagagggttttcggatctcgcacaagaaagaattcaaggcaaatccatgcagccttgtgaaggcaagtttattaagaaacttaataaactaagttgaaagcaagttttttaagaaagtaaaggaataaaagaataggtactccatagacagagcagcagcatgggctgttcagctgcttatacttattgttacttcttgattatatgctgaacaaggggcagattattcatgagttttccagaaaaggggtgggcaagtcctggaacccgaggattcttcccctttctggaccatacagggtaacttcctgatgttgccatggcatttggaaactgttatggcactggtgggagtgtctttgagcagctaatgcattataattagcatataatgaacagtgaagaagactataggtcactttcatttccttcttggttttggtcggtttctttactgaaaccttttttatcagcaaggtctttgtgacctgtatcctgtgctgacctcctatctcatcctgtgacttagaatgcctaacctccttggaacacatcccagtagggctcagccttattttacccagcccctaatcaagatggagtcgctcatgtttaaatacctctgacacgaagagaaattaccacagtgaagttccatggtatcagagaggggtgtgagaatgagaaaaatctcatcaagatggtgcccaagtccctgggatggagaggagtactttaacctatcgacaaaagaaccaaactctgtaaaatagtaaagagatttattctgagccaaatatgagtgaccaaagcccatgatgcagccccaggagcctcaggaggtcctgagaacatgtgtccaaggcggctgggttcaccttgattttatacattttaggggggcagaagttacaggcagacataaatcaatccatgtaaggtgtacagtggttcagtttggaaaggcagaacaactcgaagtgaggtggggcagggaacttttaggtcatagtaagggaggagaccccctctcatattgccttatgcccaatttctgcctccaaagaaagaagaagtaaaaactaaaaggcaggaatgaaatccacaggcagacaggctggcgctgcaccctgggcctggtagttaaagatcgacccctgacctaaccggttatgttatctatagattccagacattgtatggaaaagcattgtaaaaatccctgtcctgtcctgttccattctgattactggtgcttgcagcccccagtcacgtatccccgcttgctcaatcaatcacaaccctctcacgcagacccccttagagttgtgagcccttaaaaaggacagtaattgctcactcagggagctcggctcttcaaacaggagtcttgccgatgctcctggccgaataaactccttccttctttaactcggtgtctgaggagttttgtctgtatcttgtcctgctacaataggtggattcaaagattttctgattggtaattgcttgaaatagttaagttattatctaaagacctggaatcaataaaaaaagaagtgtctgggttaagataaggggttgtggagatcaaggtttttattatgcagatgaagcctctgggtagccagcttcagatagaatagaaggtaactgtctcttatcagaattaaaaggtaccagactcttagttaagtctctcctggtcccagaaagacctgaaaagggaagaggattctctacagaatgtagattttccccacaagagacagctttgcagggccatttcaaaatatgcccaagaaatgtattttggggtaaaatactttgatatcttttagggcctgccatctgtcatgtgatgctatactagagtcaggttggaatttgatattttattgctacaaacagtctgttttgtcagccttaagatctcttttttaatgttaatgctggtcagttgtgcctgaattccaaagaaaggagggcataatgaggcatgtccaacccatcctttctatcatggcctgaactagttgtcaggtttactttggaatgcccttggccaagagtggggcccattctgttggttaggaggtctccaattttatttttggcttataaagtcaaagatggacagaaagtacgctagaggagtgggagggctgtgcaatgccttgaggtctgaaacaggcatcaggaggatcctctctttgctgtcccagagaagagtcttctaaacatcatcccttgtcactgaacccactgagttcaggaaatgaaccaagtgaggaaatgtggagtgaggaaatatggagtaagcagacccccactggataatactttttgtccatttagtgccttgctccttgtcagattcaaaacagcttcctcaatagggtcaatgatccactcagcctgaaccaggatgtgtgatgaagtgcaggcttttgcatctgcatatgaatcacttaaacttgttcacccactgcttagcaggaaatggactttccaattaacactcactttgctctccccagttaactagctgcctctgcgtccctctcatgagaacactcagttttcagagttcagagccttccgctttcctccccccatggcggtgtctggggtggacaggagctcctggcagtggggagaggacactgctaaggtgtgtgtgagtcctgagccacccctgggtcttggctgcctggggaattgctgtctcttgtgcttggccaggccgctgtcctgtccccactcctctttgactgctgaggctacagccaaagaactctcagctgattttgctccacttcctagagcctagccatccttcccttggcccacttcatgggcccctttgggtctggctggggctcattttcacttcctcgctgggtgggttactctgcacgtgtcacagcatcgcttctgaatgtctgccaccctcctgggacccgtggagaccccaaggggaaccttgaccctccttctgcctcactttgccactcagatgacttagtgtggatgtggccacttctcctggggccagggacacctgtgaaatggtgttcttatagaatgcccagtggggattacattctctatatcaaggcagcctaatttggtgggagagatcatggatttagatttctaattgcctgtcttggaatctgactgcttacaaatctctaagaacttggcctaattgcttaaatgtataatgcctcagtttcctcacttgcaaattgagaatgatgaaaatagtagcttctatctcttggattagtactcttgcagcacttagagcagtgaataccatgttaagccacagaaaaattactggctgtcattattaatataaccttgaatttattgtggttaatgaagtacagtgagaaagtaaatgtcttattgctgagccaataagattccgaagatacttcaaagatgtgccactactatgactatttgctatgtgccaggtatggtgataaccgaattataatgcctagaaactggtctaatttagaccaattctacagctagggaaaaaatagattagagaaattgtgttacctgccctgagtagagaaattaatcttaattttaatttgtaattgtctcagtatcttcaaattaagttgtggctaacttaatgcacatgtatgtattcatttattgaatatacacatgtattcataaatatgtacatatatacatatgtattcaaactggtattctgcaccgtttatactgatgtgtagaatataaatggaagttttaaaaataaacatatttccaaaagattataaagtacaatggcatgtgtacaagttatctcttactgtgtaataagtgatccccaaatataataaatgatcccctctagccttagaatgtcagaacaacaaacattatctcatatggcttctgaaggtcgggaacctaggagcagtttagtgagttgattctggctgaggatcttcattcagtggctgcatacctgttgttagccagggctgatgttatctgaaggtgagactggggctcgagaagccactcgcaagagtctcactcacttgtatatggactggaggcctcagtttccccccatatgggcctctgcacaggacttctggagggctgtcatggaatagcagctggctttccctagacagtgatccaagagggacagagcatgaaaaacagagcagcagtttgtgatctaatcccacaagtccccagtggcttcttttgtttcttagaagtgagtccataagtccagctcatactgaaggggaggagagttaggctctgcctcttgaaaagaagatatggatgaatttgtggatgttttaatattgctgcacactgcgtccacttcctacccccctgcagcaaaagagtgctgtggtttgcagagctgcttccctgggatgctttgggtgcagcttcaggcagtgggtgttttctatgcacattattgccagcagccaccaccaaaggaagggtgcacacttggagagctgctgtgaaggaggcaccttgctttccaccatctatgcatgcccaaagcgttcatactgtgaaatgatcgaaaacattaaggggcataatttatctggagggagtgtgcagaaaagccaaatgatcctttggtagtaaaagccttcttctttggccttcaatcagtcatgttggcttatgttcattccctatgagtgcttctctaagaggttttctctaaatatttaacctttctatggctttagatctctttccatcatcaaagtcttcatctttgcagttacctgcatctgaaatgctgtcactgtctccttacgggggctgactcttcattgtacagtcttggtttaaatgctacctcctcagagtccccttgccagaccagtctatccccaaagaacctacgatcttttagattatagattatgctttggttttattttccttgatagaactcagcacactttgcgcttacatgaccatttgcaggtttgtttgtctattgtctatccaccttgttagagtgtaagtacgataaaggtggttttgttgcaaatattcatgttttggatgcttttagttcccattgatacacacctatatacacatatgtgtatgtgtgtgtgtgtgtgcagtcaggcatttctacagaatatagatgagaaaattggaagtagggggaagactatgcagaccttgtcaattccaattatatttcccagaacttgtagctaaaagataataaaatccagcatctctgttagcactcagaattgttaattcatgagcaagcaatttagatgaattttagatgagaaattgaattttcagccgcacagcaggaaaataatcacttactatagttgaaaatagttatcactgattagtgttcctgtgtttgatgtggtagctcttctgctgtgtgcagcatggggtgaagtagccaggtctgtagacaagacttttaatcaatgaaacaaagccatgtgtaaaagcgtctacatggaaaggcactgagggcaggtacaagatgcttcttcgactgtgaagaagagaaatgtgctgctggccaggcctgggcaccaaggttagaacacttcaataaggaagttaaattcttattggaagaagaccacgaacagggtacagtctctacacaggcttagctgcatatctacggacagatgaatgtccagatcatttttctatccttctaatagctcctgcatgaagccaaaatactcagctgaaaagtgagaattttaaccatcaacataaaaataagcttctatgtattgaaaatatgtataattggcattttgctgaactgtggaatagcagactggggttttcagtgtgtatcgtgagcccactgcacacctgctgtgagtggccctagaaactcaacaattaaatcctaatctctatgactgtgggtttttctcttgaaacacactgtggtcagtgcttctagtccatctgcaaactaagcaatgagagttgctatatacacacatgcaccccatatattctgtaaaatatgtgtatgggcagtgagtcattacatagaacccaggctttcagaacttctgttaatctctgtaggatttagggagtttgaacaatacactgcatttttctagagaatgtctgtgcaaaactcattccatagagaggacacaatgagatccttctaaatgggtgaattaaggaagagcgtaggcatcaatgactcattgacagtttggtgcataattatgactcggggttgctccaggcatttgcatcatctattagacaataagcccacatggcttcttaaagtgctcaatcatcatccataaatggccataacatttctcagctttataagcacagtgaacttggttgcttttaaaaatacatacaccacagaaatttatttggaaaattgacagtttgtctcaagcttgttcaattctaatatttattgcagcatgtaaccagcttataaataattgattgtatttcctataaatttatttgcctcaggaaaatacaaaatttagtttaaatatcccaaatctgtgattgcttttagattataaatgttccctctgctacgaaatacacatgaatcatcatgttctagcaaaaaatattacatagtcataatgcagcctccaaaggtgactgatgactgctcatcatagttgctactgagaagtattcggcatcaaatgattcatcagtcatattccagagtctgtttaactatcagggatagaagcatctaaaacgtacagcaaagactttacatcaagtatacctcccacatttaccctgccttaaaaactatttagaatccaaatgtgaaacagaatgtgtgagcacacataattatccgtgcctattttcacatttacatagcttctataaaaaccacttctatctcttttacatgcacttaattaagtctgccatcttgctggcctgtaatgtttgacatgctcaactgaaagcaaatgacaaaaatgctaaatgacatttccattttcttatttaaaagatttattgttcaacactatctgtgtgtggcatttcttcacttgcttataaatattttacaaatttcgatagcttcaaatttaaaagactgattagctacattaacaacccaaataattgaagaacagtatacttaaagttccgggcattaaatttttatttttgatcatcgttggatttgaattgtataaaattaagcattgtatgcaaatctagctctgcaggggaaatttagccacgttgctttttaagagcagccaaacttggttgccctaagagtatctgaaaaaaattaattattgagaacttaccactagtaaaaacattttggaaactgcctttctcctttcttttttctccctccatttctagggtcactggctattccctcctgctgggaacactcctcccccaagtaaccgcataactcacttccaagtcctctccaaatattcgcacaaactttcaccttcaaatgtgccctatggagattgtgctatttaaaatggtaaccagcctcctttgttaacccttccccaggcctcctgatttattttgcccgctatattttttttcctggcccttatcactttctgacacatgatataaagtgtttcttttcaagatattattatttctggaccgtcttcccctacagggagccaagctccatgagggcatctgttttgttcatctctgtaccccccaaccactaggatggtgtttgtctccaggtaaatactagcaaaccaggggcaacctttgcattaatccaaacacctggacaatttgctagaatagcctactttattgatgtttctttctttggactgcttggatgtcttacacacattttttgattgagaacaaaaattgggaactcgaacctttggttacgagtaattcacttctgcactttccacccctcagagggcacacagccatctcagaaatgttgctactaaccctttggtaaatgaatttctacccaaacactgaaagctgtttagttacgctaaaacattagatgtgattaaaatcaatttttatatttaatgttctaaaatggaatttgggcactactctcagaccttttacaaaagagaacatttttcccctcttgttattgtaggaagatctggaactagaactaatcattttcaaattgttctcatggcactgaaaatacaattctccttcccacggctgcttctattgtgagtggccaatgaaaaacatcgcccctcaattcctttcttctttccacattttcatccataatccaacctcttaaaacgtgtgaattaggatatatgcttagcataaggtcaagataaactccgtataaaatgactacctttagaagtattttaaatatgctattatagaatattccactttaagggattttttcatttatagataaatgggtccatttgaggaacctgaaattatgattttgctttcccacaaaactttctttaatcctgttgctagccagctgacctgaaaagatagtatcctaaatctaccttaaactccttccatgtctgtttaattctgattccttcttctgcaacccagcatttgcagtctctagaggaaaataaaagtcaatcaaatttaaaagtgctgaggctgcccggagatgacctgtgtgtgcttccccacccagcccactttcttggagcctccccaggggtccctggggacctgggctgttggaccctgctgtctggtgtcagcggtgaggtgtagcagatccacagtggacgtacctgatccgccttcactgccccctccttgtagttgcctatgagaagcttctggtcctgttggcttgatgctgtggccatttttctccctcgttatctctgacatattggtgggcattatttaacaagcatatggtgctaattttgtgtcaagcacagctctaagcactttacaaagatgaccccattgaagacctcataaaacagccccatgaggccggcactgtggggatgcccattatacaaaggaggaaagggaggtgaggacggggtgagggatttggcctcccccagctgatcatggagccagaatgggaagccacaacagatgtccactgttttcctgccagcagcagcccctcctgattctggaggggagcaggaagggcgtaattacactctggctgatagctaagatcacgctgggaattccacggagagagaccctggcactccttctttggacagtggccccaggccaaccgtgtcctaataagggcctgactacagcagcttacctaaagtcaaagagagagcaactgggagaggtttgcaaaggtggctgtttaaatgggggaaggcagaaggggagcaaggctagctggcaattcatgaacacttcccatttgttatctcatctaattcggccaggcctgtggataatgaagtggtatcattgttattcccttttacctaaatacacaaaatctgaagctcagaagaagttgaatgaattgtgctaggttatatggctaacacggggtttctcaggcctggcatgatggacatttgagggagaatgttctttgtggtgtgcactgccccgggcatcacgggacgtttagcacaggccctggcctctcccagtcgatagatgccagtagtatcaccaggttgtgacaaccaagtctctggacattgacaagtgtcctctgggaggccaaatctggataccctaccctcaaagcttgagctcttagctatgatgcctccccatgtaaccctggagatgaccccatgactctggctttagtgataaagggttgaactagatctctttcaatcaccttatggccctaatggccttcattcaagaagcgtataacctggtagaagacacaaggtgagtacaaaatcagttgtcagcatcttctccattgttttaattcctgtcctcacccacctcgatggccccaggaaacactgaactgaaaaagtagaaggtatggatggatggcttccacagaacttctctgttttggagaagcaagcacattttttccccttttattatttattttattattatttattattttatttatttttgacacacaataattgcacatatttatgggatacagagtgatattttgaaatgtgcacacaacgtataatgttttaaggagtcaactacctctggcctctgtgaattcaggccatcaaagtcctggccagctctatgcccacacgccctggggcagccttttcccttgcagggctgaaaggattccctggtcctgaattggtcttgatggctccactagcaatggtttcccagacaggaaggcctctatgagccacgggcctgttctgaaagtcacatttctgtgacacccagacgttttcagtaaagggcccgcctgctggctctgactgatgggaggtattctcccatacctctacatattcaaaagatgaaactaaatacatgaggattaagtacttcagtgaaacagaaattacaattataatatattctttaacagaagtgaacaggtggtgttttaaatctatccaagattaacccatattcaacactttaagcacccaggctgtcataataaatgttgtctaattatatattcttgggagtgcattttatgttgggtttttaaattggaatttgtatccagctgaagttatctacacagtgcagtttttgtgtatagcaaagtgaggattcaaaatattaagtattttttgagtaacttcacttcactttgaggtctctgtgtagctgttctccagaaaggaatgtagtcaagaacagtgaattataagagcttagtgttttccaccttttgaaggcctagttgcatccacataaacttttggttagttcagggtagcaatggtatttataaccctagattttcctaaaattcagcccattctccatgtttggtgactttattcaaggtttcactctcacatagttgaattctactggttttaactttaaacacacgcagtcatttgcatccctagagtaaagatgtccagaccttcctcatttttgccttacaaaaatgcaaaacagtggcacatgggccccctaccaccaaaattataacagccacaatgcaacttacattttggtggaggtaatagggtaatgtaatgttttactggttcctactatcttaggggatttcattagctacaattcaggccgtgagatgcaaccatttgagcccagctcataaaaagaatacaagtatttctgaagcctttccattacattactctaacaatccattcccatcatcctaacaatgcatttcctctcatgagcatcagtggagggaatagtaaagggagcttgttgagctcaattccaaggtctgattcactgttcctgctgccctgtcagcccctgctcttggaatctagatgcatggactcttagattccactctactatggaagttcaaatctttcctagaaaggggcctggggacttccgtttccatagtcatatcttcctcaggagcataatttccatgacacatgaccctccaaccgtcctgcacatggtgcttctctgaactgctacactgatccagaagccaaaaccaggcattctcaccatctcctaccctctcctcacccaaagaaggcacttcgtatgtatggtagagtttcatcagtatttagagggactgagaaagaaatcaagttgcaagaacacacactctgatttttttcatgcagggtaatgcagcctcttcccccaaatttggatctaggcttttttgttgggggggggggggggtacagccaagcccatcagggagctcagagctaaaaggcagtgctctatttgagaaaggacactatttagaagactgtggaagcaatatttcccttgttgagcagaaatgttttattctttctgtaagttcttggaatatgaggcctcacatgactagaggagctattttaaatatcacaggagctgttcagaaaatggccttgcccaactcaggaccaaggacagctctcaaacccttagaaccaaggacagcgttaaaggcctccccaggtgttcagcatcacaaacaaaacacatttccgtattatatacattttgcatattaaagagagaaatagcagaggcaaatacgctctaaggccaaaggcaattctgtttctcacataaggaaattcagggtactagcaaactatatttgcctctaatttgatggacagaagcagagaaatactggccaggtgaagttttaattttcagtggtctccttgggccagccactgcaatctttcctcctactgttaggaacatctccatactcctgagctccagggcctgcaaatctccaacaccactgacccctctcaaatggcaaagcctttcccagggtggaacccctggaatggtgtttgtggtttactttaaaaggtgtgaacaaatgtccttgataaattatgtgttacttgaagttaaattcatcttgtttttgcaatggtattgcctagattgcctagagcctttagcacaacaattgcatttggattcttcaagagggggaatagaatacccagcatttctcaaaagtttttaacagaaaagctttatgggggtaaatgcaccattcaagactagagttgtgaggatacacttgtgaaaatgctggatttggaaggaacatgctcttggaggcaagactctgtctcctccccaaggaagaggagaactgatctactcatgtcggtcttgctcccatacacaccagcaggtcgtacccacacacctggtgcctgtgatggtcccaggatatcctgatgtgtcccatcttctcttgtttcttctccactccaggttattactcctgcatctccacatcatctgctcctatctctttggaacagccttagcattctttctctttgcctgggtcttggggtagagaagtttccacaaagaggacagaagttcttagccaaaagcaattcaacatcctggcttgtcagcagtgggaaaaaatcctgagggtggaagaacttcaagcatttactgggactcctgtctgtccatctgcaattcccttcctagtgtcattaagagaagaggtttcatgcctgatgcatctgtgttcattcaaatttcagccctgcctcttactgtctttggcatgtttgggtaagtcgcttaacatctctgagcctcaacacctcttctggaaattagagatgatgataataataatacttattgcttatatattgctgtgagtatttcatgagataatgtatgtcatagtcttaatcagtgtctggcacataaaatatggggaatacacattctctgatattactatttttcgtgaatgttgttgtttttgttgttataattcgtatgcccaattgattccagtgcataatctagagaatgagatccacttaaaccccccataagcatccatcctcagaacctcacctccctgggccaggcagcagaatgaatgtgccccttcccttgaaatcagagtctgctgtctccccaggaggtgcctgcgtggagctctgcctcttcagattaaatgctgctgttggcagtgaaacacacagatttatttagtcatcatatttgttgggttgctctactgaaaaatgatggctcctaattaacatatcaacacatgaatcatttctggagttctagctgcacaaactgcccagctgctggtcatttctcccagaaaacaatcaagggaaatataccaagctgtggttctccacctcgtcctctatcctcccccacccatgcccacgtctcccctgctgttcccatgagcatgacaggctccatgggacaggagaggtgccagctgagagcaggctgggggctgcagggaatgacttggtcttttcatgacaattgttctcaaccagattagaggactctaacggaggcaggggtacggtttcaagagatcattcatcttgaatacagaattgagtcttttattactgaggaacagtttccaggtatctaaatcatagaattggctcaaaagtctctccctctcttcccaagcacgtgaaccaagtcctcatcttggcctgtgagtactgtctccacaggcatcagtcgccaaccaacaggcaggacttcacaagacggagacagccaatctgggctggaatgggctcatggttggggtagtggggaagggtatcttaacactaagtaagattgtgtttctgcctgtgtctcaaaatgttcattcctacatgtgtggcaattagaaaagacacatgtgtttgaattcccgttctaacaattaaattgttcaagtcttctagtacccaggaaagacataaggcaagcccagactttcattcagtctcacctacaatctaggcacacactgcttgctgttttgatcatctcatagttaaatatgtgaagacaatcacaagccataaggaccattgtttttttctgccgcagattcctcccagtgcttgaggacttgctaaatcgtatacgtacctaatttccatctccagattctacaataggtatgtcttattttaagccagtagacttattttgtcttattttgtggcactctagttttcagcacattcagctccaatgccaatcgtaaccttgaaggacacaatcgtgaatgccatcatcgcaaatgttggaatcctgaaaaatttaaatccctagagtctaaaatccctaacatctaaaacccttccaaatcaccaacctgaaagattaaagtctcagatggtgaaattctgaaagttgaattgtgcagaagggattcatgtgctttcattggtacgcaggatcgctgcgttgagttagttgcatcgtgttaggtgaaactattgttttattgtttcagagacaacttgttgttgtctttatttggaaattgagtatggtttaaggagaggcatatgggagccaagtaaataaggtgtggacttgtgggctttattccacatgtcgacttgactggaataaggaatgcctagaaacctgtaaaacattatttgaggtgagtctgtgagagtgtttccagaggagactggtgtgtgagtctgagtgggctgatgagaaagatctgccctcattgttggtgggcatcatcccatctgctggagacctggagagaacaaagacggaaggcaagaagacagatgggtctctttgtctgagagctgggacagacttttcttctgctaccttggacatcacaactccagggtcacttgtctttggattctgggacgtctaccagcacccccaggtcctgaggcttttggccttgggctgagaggtacatcattgcctttcctggttctgaggcctcagactgactgaaccaggaagctctcagcatcccagcatcccagcttgcaaacagcttgtcgtggaatttctcagccaccataattgtatgagccaattctcgtaataaatctccccttctatatctatgtctatatacatatattatcagtatcatctctctgacaactctggctaatttggtgttggggaagctgaatatccttccttcttactgtatccttcacaacataatggaagaaatctgtgaaattgttcccttgaaaaaaggctgtgataagtttagtgtacgaggctacctaaggtgaaagataaaatattaaaagctagttattattggtgctgcaaaagcagaaagtctctcttatttgcaatggccatgcaataatcagactttccaatgaacgagcacatacttataaaatgtgcaggccaggcacagtggcttacgcccatagtcccagcactttgggagactgaggtgggcagatcacctgaggtcaggagtttgaaaccagcctgcccaacatggtgaaaccacatctctactaaaaataccaaaaattagctgggcatggtttcaggggcctgtaatcccagctacttgggaggctgaggcaggtgaattgcttgaacctgggaggcagaagtttcagtgagctgagatcacgccattgcactccagcctgaatgacaagagtgaaactctgtctcaaaaaaaaaaaaaaaaaacatgtagatcacaaccactctccaaatacaagtgcaccaagtgtttggaagatcatagaagtgaaaatgcaggtgaaaaatacaagaaatattttctgccaaattattcaattatgtatggctacttccctttcacacatagcaccaacctactatgctccgtatttcatcttcgcatcatttccaacattgaaggtataaattctgtaaagagttttagagagctctaattcatattacgcatttttgcaaattgactccatggaagtaccttacacaaagttgactttgtatgtaagcattgtgcatgtgtgtgaaattaattaattttaattaattaacaaagagatgtccttttaaataataagagatggcttttgtacatttgcatttgtgaaagataatattgcttgacattcctttaacatttctttagccatctgcacatgtggtggtaactcatctcagtttttgatcaatctcctcaaaagacacaggttatctgtcatatttcagataaccacagtcatgaacctgcgtgcatgcagtcaccaatcattgtcatacacattcatacatcttgctttttgatctatttctttatgaacagagcttgcctgctcatcactgttatacccatgtgaatgtctttagtatacctgagtgtttatgcttgcaaaaatatgtgttattcttgtcgattttattgcataaagtggccaatcaagtattctgccctatttttatgcttctaaaaaatattcccttttaaaaatgtaaataaatgttctctttaaggatttagtttaaattttttccagaattgtattttgaggattttgatctttcaagagtgtaattttcaggattatagaccttaggggtttccgatttttcaggatttcaacactcaagattgtgatgttcaggattgtgtcttttgggattatggcccaaacctattaaacccatatagacttttcaatatacatgttacagtatgtatgtcattgctatgatgagcaacacatctgataaatgtgggcaatatctttatcaactataactaaaaaatcaaaacttctattgtaacttttaagctatacttatattgtcctatatactctgattgtctgtgtatattgtgttctattagaagataaacaatattgggcttcacagttcctgttattgaaaactccaagaggtcctgaaaaaatatttaaaataaatttttaagagatgatgacttacatttttaaaaaaggatttgttcttgagtaacatataaacagtacagaacacttcatacaccactttacacaacaaaataggtgataattcaggacctcttggagttttcatgattccagttattgaaaactccaattgctgctccttggtgaatccctgggatttattgcagggtcagtaaataatgattgacacatgcatacatacatataccttacatatatattatgtatatgtatcagttagtcaaatattatttgaatggataaatgaataaatactaagatagggactttgagatagacgtttggattttattagcttatgtgcaatcttttctggtcttcttcaaccactaagagtttcagaacacaagcatgtggcatctatagaccttgactactgtctatcaccacacatgcaatgcatggtcaaaccataaagaaataatttttttactgcaggtctcaaccctggctgcacactgggatcacctaggaagcttttgggaaggatgaagatgtaattatgatgctggttgcacaattctataagtatgctaaaaaccgttgaattgtatacttaaagcaggggaaattgatgatatgtaaattatatctcagtaaagcagttaaaacaaagtgaatccctcacccagagattcaaattcaacttgtcccgaatgcagctgataaactctccccaggtggttctaatgtgcagccacggctgacgaccactagttcataatcagttcagaactctatggccaatcaattccttcagacacctggaatcctggaccagctacagggacaactgattattctatttgtgtagacctggctacccagggacccacctcaaatgccacatattatcaataacaccttaactctattgttcccaaacccaaccaaacaatatacaaaacagggagatcctgtatacaaagcagacatccgttggttcacctaccaaccttccgcatcactgtcccctatgttggtgcctggaaatctgaatttgtaaaggctccatagagtctgagttccctgaccaacattcatggggctacgttaatgtcttgtgttaaaattccagtacccaagttctcaagtaaacagcaaatattactaggaggcgcatgtcccaaaatagtttgggggaactatttgcactcaaagtcacaaggctgataaatgataattaatgtagtcatgtcataagggagagtgacattcgtgtgagaacagctagagagtgagattagctcctgttacttcttggctggctgaccatgggtgatgtcttctaatccatcggcactccctttcctcccctctcctgctatggaaaaagggctgaccctccttgggctgaggtcaactctcccgtcattgttctgaagcccttgctttcacagaaaactaagattctcaattagattttattcccttttataacctcaacttctcagttgccattctttctttcagttcttaaatatgcttctctctcgtcttaataacaaacaggcaaaatcctcaggactccaacctcccacttccctctcctggccagccatgtcctatccatgtctccattttgcattcacccttgactggactccaccagtttctgctattgcttggctaacacatgacttgttcctgggccatccatgccagcacagccccagcatggaccccacctcccaatctgccttcctcgtgctctcctagctggttttccactgtgggcattctcaaggctctgttcttaccctctagttcttatttgccctaccctttgtctttgttagtatttgccctactgttcctctttctttcctagaagttttcatctacttcgatgcttcaaattgctacatataaactgaaggctcccagaagattgctccctaccagatctattcaacagaacactcaacaaccctagctttcaagtctctctcaaattcaatatacccaagctgaaatcacgatctcccctataggatctctgtccgtcgtctccaggttggtgactagtgtcatgccccatccagtgggttagctcaaaccctagccatcacccttggtctttcccctcttcatcccccttaagcaaagttccccacatcttaaaggatttttaccctcaagtatttctcacatccctttggtgcactgtatctctgcaacctcatattattccaaattgtctatctaaagtgcaattcctgtcaccactttctcttaaacccataaatgatcctccacggatcaggggataaaaacaacaattcccggagcctcgttaaagcccctggataatctcaccctctccatctccccagcagtggtcatgactcactcccctttttctttactctccagccacactagtctctgtcctccatggagggaaatgagtatcgttttctttggatgctgtgttctcaatgcccggcacagttgctgccacatcacaggcactggcaaaatatctgttgatcaaatgaatctgaattccctaagcctcagtttgcccatttataatttggggctagtgatagcagctaatatttagaatgactttatgaagatgctacacgatagcactgccaatatactcagcagagtctagcacatcactggggcaccgaacaaagataattatttaagtgatgatgatgatcctgtggtccaatctccttgggaggctgagtcaggaggattgcttgagcctagaattcaaaagtgcagtgagctaggatcacaccactgcactccagtctgagcgacagtctcaaaaaaatgatgatactgattaagaagaaaaattgatcaggtgcacacattcataggacaaaacccaatttatactagatgatcaattaatgttattggaagcagaagcagaatcttacagggtttgtgaatatcacccccatatttgtatatttgagaggaaaaaaaagcagtccattttgatatggaaaagaacagatttggcatataaaggataccccagctctggttcaaatggtctttgtgacccctggcaagttgcttaccctttgtgggcctccatttccttgaacactaaatgggtgtattggtctgaagaggtatccaaattctccaaagtcttctaggagtgaacccttaatcctgggtagggctgaccatgactggggatggggcagtcagggcctcacccctgcttcattcagagcagctcccattttatgtttctatgttaaattctggaacaaaatgttctgtgtctaaaaacccaatggtgatacgtaaaatgtgggattgaggggatgtttgcttcagtcacgattctttgtggtgcaagccaaagaaagccccacccaagccggcctcaacaggaagaaaatgtccactcacaagatgtccccccaggctcaggttcatgtctccgtggctcctgcgcctgcttcttccccagcctgtctctcgccagctgcagctgtggcatccactgacgcctgtcccctaatcctcctacccacgggaggctggccgcctcatcaggcaacgtctgtgaaggagccagtcctggcaccgcaatcccagggtgaccccaagtcacgtgtccatccgtgatccagccacggagccctggggagcacaaggtgctgctcacgtcagcttggggttctgctccccactttagggctgaggattgagcctcatgtgggttatgtgacctgagggtgtgaggaacggggctcctcaagagaaattagaaaatggtgactagacagttaaagaaatgctgcgagtgaaaccaaagctcaaacattctgatgcctggacgactttaaatcctcagaagaatctcaattccctcaggcaacttcagtggaaattgctgcttcagctccagctaccaaataaagcctccccctgacccacaaacacctctggactatctcttgggctaaaaaatttaaatttaaatctccaggccctcggaaaaagccaactggccttctcttaactcaaacctcgctaacagaatagtcaggaaatgaacaaagccctccggagtgctgctgtctgcagaattccgactgtcacatcttcccttctccgggctgtttgctctgactcttatccgctctatcttgaagagcttgacaagttccctatccattcaagcagctccctcgccattacatacttgctgacctagaatattagtcttttgtgtgctactatatcaaaagctttcttgaagtccaagtaaattatagccaggcttcctcctgttgactcagtgctgtttccttgaaaaattctatcagatcaaccacgcttggtttttccttggtgagtccacgccgactacctgtaattaagccagggcgagcgcagcccctgcccgatgcgccgagagcatgttccgctttggctccctctgaagccaagatgaagtcaagcaagctcgcgagtagcgtggagacctctgtggccccttctccagggatgagccaagcagctctagttcctcttacgtttttatcatgcatttaaaagagcgtcctcaaaaatcgtaatttcagttgaagcgggagaaagctcacggaatttggaagctgaagccttcaatccaaatccctcctctgccttttagtagctgtgtgcatggctctaaaggaatacctggggctgcgtaatttataaagaaaagaggttgattttggctcacggttctaaagtctgtacaggaagtgtggtgctggcatctgcttccagtgagggcctcaggaagcttccaattatggcgaaaggtgaagggagaaaaacgcgtatcacttggcgaaagagggagctggaggagagggagatcctaagctcttttaaacaacgagctctcatgtgaactcatcaccactcatgaccatgggagagggcacaggccattcctgggggatctgcccccatgatccaaacacctcccaccaggccccgcctcccacattggggatcacatttcaacgtgagatgtggaggggaccatgatccaaacacctcccaccaggccccgcctcccacattggggatcacatttcagcgtgagatgtagaggggacatacatcccaaccgtgtcacatcgtcattctgggcaagtccccaaatgtctctgaacctcagttttctgactgtcaagtggcactgataatgacacctggtgtgtggggtcattcacagaattgatgaattaatgaagttatgcaaagcatctcatcaagtcattcattcaacagtctgccacattatagggactcaatcaatggtgtcatttacttatttctgcaagtcagatacttccctaggccatttcaaatcttatttcccattgccatttttttcactgcatataaccttaaatatcccatcccctcctccattttgtgtcatgtttaatggagagaacatttattccacaatctttgtatttgctaggaaagaactgcccaaaccctttggttttactctccaccccttatcctcagggaggaacaaggttttctgaaaaatgagtttggatcttggcatattcaggtcaagccctctttctctttgtaatctgcctccctacagcagcaggaaggtttgggtctactcttgttttgcccagagtggtctcgattttttttttttttttttttttttttttttttttttttttgaggcagagtctggctctgtcgcccaggcaggagtgcagtggctagatctctgctcactacaagctccacctcccaggttcacgccattctcctgtctcagccttccgagtagctgggactacaggtgcccaccaccatgcccggctaatttttttgtatttttagtagagacggggtttcaccatgttcgccaggatggtctcgatctcctgacctcgtgattcgccggcctcggcctcccaaagtgctgggattacaagcgtgagccaccacacccggcctggtctcgatttttgatctttttctggaataattcttactagcaccttcttttggtctcagtgtgccccatttggggtggtaaactccagtcaccttgtatctttgtcatgcattagaagtgtctctgtctctggcacagggggcagctatccagttgtgtctgcgacaaggcaggcaagttggcttaactcaggggtggctagtactctgcctactaggattctgtaaaaaaggagaccttattttttttttaagtctctagctgcccacctcctgtatagctccttgttggggtaggactcaggcagaagagaatgctagcaatcctcctaccctgtctggaattcatgtcctccaattcctatcttatcctactccttagttagactaaataaaacactacccatgatgtctttcctacaccatgccaccattctccatgagcttggagtagcatctacttcctctgaactcccaggggtccttctctgtacctccaggtgatacttgtccatttatccagcacagctatactcactcattcatatacagttacattcgttcacttgctctttcagggccagtcctgccgtagtccacttgtatattctctacagtcatcatgagtattttgctgatgggatacagtggaaaacaatttttttatgtgaatgaataagtgaatgaattgatttggtttccaggactcgtgattacagcagtacacattaccactagcctagtccttgagtagcaggctggtgcttcattctagtccatccgggggacttgcaattgtgcctacctgcagctctgaagtttataaaagttagacttatgaataaataccatggacaaggactaactgttttaaagattgctaactacagaaaatgctctgtgttcattaggagttgttagctgggagtgatagcagcccagctccatctagctaaccaaagagggtgtatcggttgacagtgcatccagggagtattgtgcaagagaaggatgggaggtaattggatgtcaggagtaactggacgtgaggatttggaggctgccaggatgcacaccccttcattggtccccacatcctttggcctcactctttctcatcagattctctttctccaaatggaggggagaatagctaccagctgccccaggttttaaggtgtctgccactcagtcacaggagagactgctcaggtcctagcagtgtaggaaagactctgattgtcccaaccagtgttgcacccacttccatactattacctgcagcagagggtgggcgctgggaaggaagtaaaaggagcttggggagggcctggcagctctagtggggaccaagcagataggagaggggtgggtgtggaggagcagttctcagaagaaggagggtctggggaaatggaacaagggatgccaacaagagattcttcaataacagcatttacgccattgtactcttcagtgccgtgcactgggcatttaccctggagtgctgggggtgaaggggggcaaggaggacaagaaggagacagaaaagcacaaagctaaggaggtaagaaccgatacctattgaaaatgaatggccctgagagcagtgggtcttggaaatgacagggtaaatcaggaccctcactaggacataactaaggccacctgagggtgaatatgtcatcatccttacaagtttgcattacagcctctcaatcagccggtgttgcaagacattaggcctggaagcccaaaactgaacctcatagacaccacctcatgttattcaagccctcccatgtccctttgcacaacttggtcgaatgcaccaaaagctatcgtttgtgtagacagcaccatgcactccacgcagggccttcctgtatcagtccatttgggatctgactccatgtaatgggcaggaagagcaggcatcattagccccattttacagacagggaaaccaaggctctggagatgaatgacttgcagagagacagagcacaggagaaccacatggtgtggaagaaaaaacccatatctttccatctggataggtacaataatgctaatggaatgaatcagtgaataagaaaaacatggattttggaatcacctattagctggacaactttggacaggctactcggttctccctccttggagcctcggtttctccaacaccaaatgatggaaatggcatctaattagcaggatggggtgatgcccagagagggtgggcatcaaatgcctgggtcactcaggctcaatactggtggcttcaggtttaagtgatagaaactggatcaaaatccaggtcttccacctagtggacctgttgtttccacttcgctcttcctcttgcattttatccttcttgcaagcaatgagagtctgattctgcagtgaggctttagatcagaataatcatggtgtctgattccatgcacctgaaaacatctcacccacccccctgcaccctcctcttaccatcacctgttgagggacagtacacagaccccaagaccatttctttcctggccaaagacaaatctcagaagttgtgtgcatggtttattgctgtggaccctggaccagaaacaccagctatgcagtgttgagccctgagaatgtggcaacatgattcccaggcagcacataatttcatcctgacaacggttttcaaaagaagttaccatttttatcttgattttttagattatataactagtaaccagccaaggtacagtgtgaaccctgacattcaattcaaccagctgtgttttaagcactctgccattctgtgtccaaggactttgtgtcctgggacaatagacatttgggtgccaaccagggtggactctactaataaggaagagccattctatgctttggtgctggtgggtaggggcagtagagagcctctataatgactgaattgagtgtcctgtctgcaaggagggagggggacggctcagaaggtagttaaaatcctagctgaaactgtaaaaatgaggctggtctttcttgtacatcgaatacatgggcttaagcttctttcttgtcacacgttacatctaatcattcaagctctgatgtttgcatgtggctggtcacactcaacttacccttgctacacctgtatgttgtttctaatcaatggccatgtcaccaaaaacttgaaaatgtttataaatttaatccatagctaaacggtatttaaaatgggcaataccgtggcaagaaattatttttaaataatccctatagtgataattttagaaagtgataaattcggccattataaaatgcatgccttgtaatatatatagtgcagcttcataaacacacatgaaaagtgcttaataaatatatgtgttgaatgaacaaaggaaaacatgaatgctttaaattttcttattcaaattgctcaccctgttttccaacgtctactaagattttcacacgtaccatttttttcaaatctaataaaagttcttatttatggtttgagtcactctgtctttgcaaaagtgagatctgttggtatcttaaagaaacatatatgctccttggaaacaaaatgaatctcttaatctgaacaccaagtgttaagtcatgacagcctagaaaaaaaaagaaagaaaaaagaaaaaatacacatagcactaaaatcagtactaaggatacttcagtgaaggcaaattccactgcatgtgacattatcttctgtcttatgaatggcagccagaccttgaacatggaacagaggcacagatgatttatagattgctagcgttgtttattgtcgtgtgaggaattctctctgcatagttggattatcgcacttcttgttgagtaaaggttcaagacatcatctcagaatcataatatcagtcaggctgagctgaattcatatagaaattcagttaccatcaaatttgcaattgtaaatattttgagaaagaattgggtgaaatgagtggcaccgtttttcatgatctgcgtgaactaatgtgtcctgtgctgcaggacaaagtctgtggtaagaggattccaaatgaaacccgcagcaagtgtctctaccacccttccagaagtgtcacgtggtgtgaggtttgctagcaccgtgtccaaaagccacctaagctgacagctgacacctaagcccaccgcatgacaggttccctaagcctagaacagtttctcaactgtgacactgtcagcatttgggctcagacgaccctttctgggggccgtcctgtgcgctgtaggatatgaacctgcgtccctggctttcattcgccagatgccggcagcagctgccctgcacttgcggcaatcaaaactgtctccagccatttccaaatgaccctaggggcagaatcgcccaaggtaagaccggctggtttagtcacacatcttttcaccctgttctggtgtcactggacattgggcctcagcatcggctgtcccaaaacgaaggcagagtacaaatataaaagcaccctgaaccaatgagtctgcactcagcaagcagggttttctctgttcctgtgcaggtaaatgggaccgtggaggtaactccagatcacccaggtgcccctcttcttcctcactgcctgcctctgaaacaaggacattctctgtgccacacaagttgccaaagatctcctgggacccagcacttagcacgtgttgaggctataaatgcttagtactcatgccaggtgagcttgctcactgtgatctcccagcacccagcacagacgttggcacttatgggtactctgcaaaccttctctgaatgaatgcggcacctgcagggagtcagggaccctttaagatcctcttttgtcccttcatcactttgccttgacaattgtgttaagccaggatgaatgaaaagtcaagaaattttgaaaactactttccatttattccttcctttaacctggtgattctcaatctatcagtcatctgtggtgagaaagcttttttttttttttgaacaatttccaatccttcatggatcagtacttttcagaaatacaatcaatcaatcgattactataaaatagaatggtaaagtaaagccataaaaacacaagcccattttaaatattagtagattcaaaagaaacaaaacactcagtcaatttgttataatagttcctaaactcctactctgaatttctgtgcctatctcccttggatggtaaaaaacagtttgcagatcccagcaggtcggggaccacacttaagtagtcttgctttaactgactttgctagtttgggacatcaaactagccaatgtctccagtacttttgattaatggccatgtatggccccaatcaagatccaggtttctgtttggtgtgcagaagactaggatcctttttttttcttgatatctgaaatttttcaaccatagaaaagtttaaatgacagtaataataacagtaaaataaacatgcagggaggtactcttcctacagattcagcaattgttaatattttatcataccctcccccagccagccccctgcatcccaggaaactcctcagtcccaggcaaactgtgatggttgatcacacgctccctacttaatctagattattcctcccacctccttttccacgttcaggcgggacatctcacattctggacctacctgactgtttccttggcatttgattcaaggcaaatattcctgaaaagaacaccatggaggtgaagctgcccacctctcaccaccctgccagggcacaccaggacttcccacagttgggaagctaagcttgatcacttgattaaggtggtgtccattgcaaaggcacattttcctttggtaattaataagtaatcatggatatcatgcatcttcttttcccatcaacctatcagtccagtggctttttgggtccattgataatccctgcctgaatcaatgattacaattagagttacaaactggttattttttaattctatcacactatttgtgtatatttgcccacactcatctattaaaaaagctccccttttgttctcttcctcataccccttatatttaaaaatacatcagtatgggcttataaatatcagttttattcactactataaactgttaccatatttttccttatttttggtgctcaaatttgtcccccattgaccagtgggaagccctgaagtccagctcctattcacgttggacgtgccacattgggctttgagcacttttctacttcctgtcacatataaaagttctaagtatgcctcgtgcttttcctgccctgggcccagaatgcattccttcacagagtccaggtaacttatacggtaaatggctttaggaagcaagacctggcactgtgtgtgctcactacaactgggtgccattgcttctaggcccttccagttgtcaaagtgaagaattttttttgtcttttaggccacaaatgtataccgttatctccaatttcacttaaacaccagaggtttttcttcaattcccccattttatattttcatctcccatctcttgcaataaaaactctctttaaacaacatcaatatttgtagtcatttgctaaatattatgatacattcaaagtaatttcagaattacaccatcacatcactacggtcatcccacctcctgagtaaacagcataggatgtctgggtcattcttttagccttagaatattttccactgaggtgtctagttagaaagctatatgcaagacttactcaaaataattaattctctgcatgttatgttatcaaattgacttacagttagatttatttgggaatatatatgaatatataacattacatattatattttatgttaatatatattataggatatctatattatgttatcaaattgacctacagttagatttatttagaagtgtatatatatgaatatataaatatatatattcttgggattttcttttgtatcactaataggtctttggatatgtaaaatctctatggaattcaaaagtgaaaccaaatacaagtgtatactcaaagactttctttctattccacctctttaccattttgattaccttctccttttattttactggctttttattttgcaaaattaagcaaatgtatatttgcacaggtacacatgctacacacatacatgagcaaacacacttactttttttctacttatacggaagctaaaaactatatatgatattttacatcttgcttttccttaacaacgtaccctagaagtgacccaatttcagttcatagagatctttttgtattttataaatttttgttttgtgtttattttaatttttttaaaattcttttaagctagaggcatcatgttacctgactacaaactatgctacaaggctatagtaaccaaaacagtatgcatggtactggtataaaaacagatacatagaccaatgggacagaaaagagagcccagaaataacactgcatatctataaccatctgctcttcaacaagttaaaaaagcaatgaggaaaggactctctattcaataaatggtgctgggacagctggctagccatatgcagaagattgaaacaggaccccttccttacaccatatagaaaaatcacctcaagatgatttaatgatggattaaagacttaatgtaaaacctgaaactgtaaaaaccctagaagataacctaggaaataccatcatggacataggacctgacaaagacttcgcaacgaagatgccaaaagcaattgagacaaaaataaaaattgacaaataggacctaaccaaactaaagagcttctgcacagcaaaagaaactatcaacagagtaaacagtcaacctgcaaaatggaagaaaatatttgcaaactatgcatccaacaaaactctaatatccagaatctataagagacttaaacaaatcaacaagtgaaaaataaacaaccccattaaaaagtgggcaaaggacatgattacacacttttcagaaaaaaggcatatgtgtgtcaaacaagcatatgaaaaaaaatgcttgacatcactaattgttatagaaatgcacatcaaaaccagaatgagataccacctcataccagacagaatggctattattaaagtcaaaacaaaaacaaaaacaaaagttgctggtgagattgaggttgcagagaaaagggaacacttatacactgctggtgggaatgtaaattagttcagccattgtggaaatcagtttagtgatttcttaaagaacccagcaatccattattgggtatatactcaaaggaatataaatcattctaccataaagacacatgcacatgtaagttcattatagtactgtttgtaatagcaaagacatggaatcaacctaaatgcccattaacagtagactggataaaggcaatgtggtgtggtgtgtatacaccatggaaataccatgcagccatataaaataatgagattatgttctttgtagcaacatgcgtggagctgaaggccattatcctaagtgaactatcacaggaacagaaaaccaaatactgcatgttctcacttataagtgggagctaaacactgagtacatacgaacctaggaagggaacaacagacaccagaatctacttgagggtgaagagggggaagagggtgactgtgcttattacctgtgtggcaaaatatctgatcaccaaatccctgtgacatgcaatttacctgtataacaaactgacacactggtatataggtaaacagaccagtttatataggtaaattaacatacctgaacctaaattgatggtaaaaagaatcttattatgttaatttgcctagtactgtgtggtagcagatatatcataatttattcatccagtctcctctgggtgggcatctgggttagttatttctaaacataaaattgtcaaataacatacaaatgcctgggcacacattgttttatattgtgaaggtatatctcgaggataaattcctagaagtggaatagctgggtcaagggaaaaatatatatttgattttaatagacattgtcaactccccctcatccgggttgtgtgtgggatggaaaggcggccttctcttgtgcaagtcgcctggcgcgtgaagtctgtcccaccaaggggagctccttcttttgtatttacacgtccccatgccctcgagctcaaaatccccactttccgactggtaggctgactcagtactaataggggaggttttcttaagattaaaattttctttctttctttctttttttttttttgagatgaaatctcactctgtcacccaggctggatggagtgcagtggcacgatctcggctcactgcaaacttctcctcctggattcaagcgattctcatgcctcagcctcctgagtagctgggactacaggcgcccgtcaccaagcccgggtaatttttgtatttttagtagagatgggggtttctgttggccaggctggtctcaaactcctgacctcagttcatctgcccgccaaggcctcccaaagtgctaggattacaggcatgagccaccacgcccggccgagtaaaagtttcttaacccaaccttggagcatgtttcaatggcctggaatggggatgttaaaaagatatttttaaaattaaaatcccaggagatttcatttttctgtcagggtcagaatcactgtggcctacagcagtggttctcaaacttggctgcacattggactcactcagcaagttacgaaacgtggtgatgccaggttctcaccttgagagatgcagacgtcattggccaccagggtcacctgcgcatcagcgtttttgcagactgagaagcagttcgaacgtgcagtccagtggaagaatccctgccctacaccaaagctccatacagcattattgcacagagcaggggattgatcaaatggactttctcgctttgctttactcagcgcctcctcttctgcctgtcatagggacctcgtggggtcttgattctgtctaatgttgcctagtgagtccgttgtcaaggttaagatcattctttccatggttgtgattagcggttatgtacatcttcactaggatgccctgaggaccccaacacacacactactgagagctcctgcaggtcttccatccaagagctacctccttgggcttagcactattttctcattaaggccatcccttgcctttcttttcattccttgtattccataccattaaattttatgtatagtatagatggacaatatcagacaaattatagatccatgtatgtatagtctgtacaattttgatatattcaattttatttaatggatatgatgtgccatattatatcaattatatatatatttataattgaataaaatgtaaaaaaattgaaatatacatatatacttatatattaattgtttgcattccttacattccattaagttctatatatcattatattaattttgcaacaataatatattatatatataatttctataatagtgtcatagataatataatttatataataatatgatatatggccgggcacacggtggcccaagcctgtaatcccagcactttgggaggccgagggaggcggatcatgaggtcaggagtttgagaccatcctggccaacatggtgaaaccccgtctctaccaaagatacaaaaaagttagctgggcgtagtggcctgctactcgggaggctgaggcaggagaatcactgaacctgggaggcagaggttgcagtgcgttgagatcaggccactgcactccagtctgggcgacggagcaagactccatctcaaaaataataataataatatataatattatatattacatatataatgtaagggatgtatatagatatgcttctatacacgctgcagtctacttctatttcttacctctagcaatttttgtcattaaagcaattctccattcacttttctaccatctctattgtttctgctccataccctacatgggcaaaggatgtggtcaggaaattcagaaaagaaatctaaacagtcagcaactgcaaaaaatggttgctccatctcagaagtagtcagggacccacaggtgaaaacagtaattttggcgcacgatactgacaacgagaattgaagatggacgtctctgagagcggggagcatttgagcatagggcagtgtccagtgccgttcagggttagttaaattggcacacatgtgtgcaggacagattattgacatgttgcagattgaagtgtatgtatgctccaacccagccatccaatccctagaaagcctctgaaggaagatactttatgttctcaatagcaattatttgctggaagagaaaaatgaatagaagagaatgaagaaagaatacattttatgctctgcttttcatgatgttgagaacttctatcctgagcacgaatgtattactgtgtaagtttaaaaataaataaatttatagagaggtggctaatggactattgctaataattcagaaaagaagaaataaaaattatttcttaaaaatcaaaaaacaacactagttaaaaaatgtaaatgaagatatttaaaaatatgactgaacaaaggctaaaatatatttgtatttatatgttaatataatatatacgtataattaaatatatttataacttgtaaaagtttgaggcagttgtggtagggagaaggacgtttaacaattgtttgtgaaaatttaaatggataccatatacctgccgggccacgtagaaatacaaattaaaatgtttaaaaatgcccatagctttcctcccagaaatttatcttctaagattagagcctaagaaataattatagaatataacatgtacaaagatttatgttagaagatatatgctgcattattatttataatagaaacaaatgggaactaccgaatattctttattaagttggttaaacacacaatggcattatattatgattaaatactacactataaatcattagggataatataagaaatatgtattacattggaaaatgcatacagtatttttttttaaagaaaagagctatagagctgaagtagtaggataatctattagtaatccatggtcatctatagggaaagggatcatgggtggcttctattttactgtttgtggcctctgaatacaaatataatatttgcattcaggataaaagtataaaatttcaaaacaaactaggaagcagaaatcaaccttcttagtcatcaagcttccccacaggtgtcacccaggctggctttagctcatttaccccaaggaaagtcctggtgctgagcagggaggaacagggggatgagaggagccccagcctcagagaatccaagagaatgctccacacctctgagacacctagggtcgtcctccttttaattttgcagtgtgtatgtggggctgcttgtgagtgggaattataggcatatgtacaatttggtgcataatatgtttcagttaagggctggagaagaaaaaaagacaagatttactttctctagtttcagagataccaggagataaggatgatggaatctggagtaataggtaaggaatgaaggcctttcaaaagatagactgaatcttcaggatggctcccaaacctgaggtttctctcatgagactcttgccagttactccagcccaggagccctctttctggtccagaggtccttctgtcccttcaccaggagcagcgagactcctgtccttggtattggccatagaaatcctcaagcagaagaccagagctgcttctgccctcttgcctgtctctgaccccaaccctcataagccctttcctttgaactcgttttaatggcatctttgttcatccctaaatgaccatcttttcttgccctctttcttgtcaacacgttttgtgccttgttgtttatagtcccctaaatgtctagggatggcaggacccaggggaaggaattgggcttgggacagggcagcctgaacccatgccacgtcccctgtcaccagccccaggatgtcaaggtcaattaatctctgctacacattttcgtcaccagggaaatggggatatggtgttgctttgcaggactgttttaggaattggagataaagcatagtgcttggatgataagtcatatttattgttatgatcactatttccggatgaatgtcccttgggaagttcaatacagtgcccaatgctagaagcaagtctgactgtatcaactattccaggaagatgtttccccaaatgcgatccatggaacatgttaagggctgttgccttggggcactgggagaattataattccagctttcactttttaaaatgtattttacacatgtttgtaaactgacaccaaatgtagttgttcctgtcactacatgacaacctatattagaaaaataatcgaatgctcacagaaggctatttgccaggttctattcaaatgctttatatatttaatcctttaggactactattgttcccatcttacagataaaacggttgaggtacagagttgttaaagcgttttccctggcacacagacactacatgacagagccaagatttggatagaggcatccagctcatgcccaccacactccattacatctcagttgcccagcagcgaacctcatggattccagacggcattgaccaatgaccctcaagtggatgctgcctgctgattgaccactgctctgcattgtgtgttttgtctgaatatttcaacatatgtttgtggcattattcaacatttatggtgtcttaaatatttatactgcacaaattggttccccacagacctaaggctggagggaggcagttttatctaaacaacagcaattgcaaatgacaaaaattcttgaggttctctggaacatctacagtgaaaacttctaagtgaagagaattatgtacaggttcattttcaaaaatatcaagagaagatcgatgaataagcaacatccaaggtaaaggctgttttggaggagcttaattttgctcctgaatattgtgaaaagtatagtttacatgctttttgtcatatagagacagtcatatagagtctgtcatggagaggcagaatgtttatagtcttctcaaattaaaacaaaatttagaaatagatttatttcatcctgtaatgcatatgagaataacacttagcaacatcatttcttttttcttttttttttttttaaccatggctcatttgtatatgtgtgcacttgacaagaggtcttgggaaagaggtgcatcactgttattaaatatagagagctttgaaacaattattagtgtggtcagccccattttgctagctatgccagaatgatcattttgctagctatgccagaatgaaccaacctgcaaattctgccactgagaaatagaatttaattgtgcaaatacaagaggaacttagccaaacagactactaagttccaaataactttagataaccttctttatttatttatttatttatttatttatttattatactttaagttttagggtacatgtgcacattgtgcaggttagttacatatgtatacatgtgccatgctggtacgctgcacccaccaactcgtcatctagcattaggtatatctcccaatgctatccctcccccctccccccaccccaccacagtccccagagtgtgatattccccttcctgtgtccatgtgttctcattgttcaattcccacctatgagtgagaatatgcggtgtttggttttttgttcttgcaatagtttactgagaatgatgatttccaatttcatccatgtccctacaaaggacacgaactcatcattttttatggctgcatagtattccatggtgtatatgtgccacattttcttaatccagtctatcattgttggacatttgggttggttccaagtctttgctattgtgaataatgccgcaataaacatatgtgtgcatgtgtctttatagcagcatgatttatagtcctttgggtatatacccagtaatgggatggctgggtcaaatggtatttctagttctagatccctgaggaatctccacactgacttccacaatggttgaactagttgacagtcccaccaacagtgtaaaagtgttcctatttctccacatcctctccagcacctgtcgtttcctgactttttaatgattgccattctaactggtgtgagatggtatctcattgtggttttgatttgcatttctctgatggccagtgatgatgagcattttttcatgtgtttttttggctgcataaatgtcttcttttgagaagtgtctgttcatgtccttcgcccactttttgatggggttgtttgtttttttcttgtaaatttgttggagttcattgtagattctggatattagccctttgtcagatgagtaggttgcgaaaattttctcccattttgtaggttgcctgttcactctgatggtagtttcttttgctgtgcagaagctctttagtttaattagatcccatttgtcaattttggcttttgttgctattgcttttggtgttttagacatgaagtccttgcccatgcctatgccctgaatggtaatgcctaggttttcttctagggtttttatggttttaggtctaacgtttaagtctttaatccatcttgaattgatttttgtataagatgtaaggaagggatccagtttcagctttctacatatggctagccagttttcccagcaccatttattaaatagggaatcctttccccattgcttgtttttctcaggtttgtcaaagatcagatagttgtagatatgcgccgctatttctgagggctctgttctgttccattgatctatatctctgttttggtaccagtaccatgctgttttggttaccgtagccttatagtatagtttgaagtcaggtagtgtgacgcctccagctttgttcttttggcttaggattgccttggcgatgcgggctcttttttggttccatatgaactttaaagtagttttttccaattctgtgaagaaagtcattggtagcttgatggggatggcattgaatctgtaaattaccttgggcagtatggccattttcacgatattgattcttcctacccatgagcatggaatgttcttccatttgtttgtatcctcttttatttccttgagcagtggtttgtagttctccttgaagaggtccttcacatcccttgtaagttggattcctaggtattttattctctttgaagcaattgtgaatgggagttcactcatgatttggctctctgtttgtctgttgttggtgtataagaatgcttgtgacttttgtacattgattttgtatcctgagactttgctgaagttgccaatctgcttaaggagattttgggctgagacaatggggttttccagatatacaatcatgtcgtctgcaaacagggacaatttgacttcctcttttcctaattgaataccctttatttccttctcctgcctaattgccctggccagaacttccaacactatgttgaatagtagtggtgagagagggcatccctttcttgtgccagttttcatagggaatgcttccagtttttgctcattcagtatgatattggctgtgggtttgtcatagatagctcttattattttgaaatacatcccatcaatacctaatttattgagagtttttagcatgaagggttgttgaattttgtcaaaggctttttctgcatctattgagataatcatgtggtttttgtctttggctctgtttatatgctggattacatttattgatttgcgtatattgaaccagccttgcatcccagggatgaagcccacttgatcatggtggataagctttttgatgtgctgctggattcgttttgccagaattttattgaggatttttgcatcaatgttcatcaaggatattggtctaaaattctcttttttggttgtgtctctgccaggctttggtatcagaatgatgctggcctcataaaatgagttagggaggattccctctttttctattgattggaatagtttcagaaggaatggtaccagttcctccttgtacctctggtagaatttggctgtgaatccatctggtcctggactctttttggttggtaaactattgattattgccacaatttcagctcctgttattggtctattcagagattcaacttcttcctggtttagtcttgggagagtgtatgtgtcgaggaatttatccatttcttctagattttctagtttatttgtgtagaggtgtttgtagtattctctgatggtagtttgtatttctgtgggatcggtggtgatatcccctttatcattttttattgtgtctatttgattcttctctctttttttctttattagtcttgctagcggtctatcaattttgttgatcctttcaaaaaaccagctcctggattcattacttttttgaagggtttttgtgtctctatttccttcagttctgctctgattttagttatttcttgccttctgctagcttttgaatgtgtttgctcttgcttttctagttcttttaattgtgatgttagggtgtcaattttggatctttcctgctttctcttgtgggcatttagtgctataaatttccctctacacactgctttgaatgcgtcccagagattctggtaagcaacatcatttctaattttaaggagctatgtgttttagaagagaaccccaaaagcaacgcttaataaaacatttttggagcatgtcctcttttataacaaaaatgcaaaacctaaaatattactttatgttgatatattttattctcactaacttaggcataagcagatttctctaattcgtttttttgttctgtaataaagcaaagtgcatataaatcaaatttttaccatttatttaagtaattaattcacctttgagaacttttttggtgctgtctactataatctaagcccacatttatatttcatgagctcctcttggtgttctatccatatatcataattttaaaatgtttcatggtcaagtaggtttagaaaatgctgatctagaactatctaaaaatgttttcttgccttgtaaaaaagaggtaaaatttttgttagctgagaacaattccaccatctgttttgatgatgtctggctaccaatggcatgaaatgccccatagatataaaaatgattaagaaaactccctccaaagaaaatgatgcccttgggttttacccttaggtagatcagaagccactggaaggtttgggcaggggagaaacaagggctgacttatgttttgaaagagacctctggctgtgttggaagggcatgtgggagggcacgtccaagcacaagggaggcggcaacaaccactgaggcaggagaggatggcagctcggtccaggggagggagcagggaagtggtgagaagcaggcaggtgatggggatggtttgaagtgtaggattggctgcaaattgaatgtgaggcttcagagggagagtggagttgggggcacctaggatctctgccttaagaacttggaaatgtggagtttccatttgctaagacaaagaagtctatgattgaattttttagctgcaatcatagctcaattggaacattttaagtttgagttgcttcttagctacctgattgtgagcaatgagtaggcatctggattgtaagggagaaggacttgccatagctataaaattggggtagttagtatgtggatgatttgccaataaactggatgagatccctcagggaaatggttcacaaacttggctgcatgtagcaatcacctgggaagctatgaaaacagactgaggcctctgtcccacccaggagactgactgcactgatctgcagtgaaaacagactgaggcctctgtcccacccgggagactgactgcactgatctgcagtgcactgagagttttcaaggctgcccaagtgattctgaagtgcagccaaagttgagaatcactgcctttgggactcaatagaaatggagaagtaaacagatctcagctctgggccacaggcaatccaacatttttaggttagagagatgaggagtaaccagcaaagagactgagaaggagcatcagtgaggagcgaggacgagaaacactggtgtcccagaagctgagtgaagaaaggagggcgccatcagctgttgaagatgctgggggcaaagatataaaatgagaactaaaaccagaccattggatttagcaatgggggtattgatagcttccttcacaagaaccgttttggtgagtggtagggataaagacttgattggataagttcaaccggaaaatagaacagaggaacttgacagaagtatagacaactttttgaaaaaaattaatataaaggggaacaaagaaatgggctggaggggatgtagcatccacagagtttggatttgggtctgtttcttggatttagatggggattacgctgcagtaggatgcaaaggaaggagagaaattggtgaactgctggggtcatgttgtccttgagcatttcaaaggagagaaactagggccagagtggaggggatggccctggacgaaaacaggagtaacaacagggaaggaagagcatacggtcaagctgcacacaggctggcaggggtggggatggcagaatgtgacagtcctctcctttctgcttctgcattcttacgggaaaaggaaacaagattttctgtgagggggaatggaggaaggggcatcaccgctttaaggagagaaaagcaacagtggactaatcctcttgaagcaatgggggagtcaaagaatttgcagtgagtctcaaacttcagcacacatcagaatcacctggcacgctggttaaaggtgaaattgtggggtttcagcccccgagtttctgattccataggtgatgcccatactgtggccaggggacttcccctggagaaccactgggataaagggctgcagagacccaccaggcttaatgagggctcccttaaggggaacttatgatttctggttgtatccaggtaggctggctgtgttttcctccaactactttcagctgttaatgtggaggtggaaataaagattggatttgaccaattgagacttcgccaggtaagttcatgtaagtgacaagtatcctctgttcccagaaatccttgaaaacgctttctttaaaaactaaatgaaaatagctcaccactgataagaactttcccaaacagggccacgtagtaaatatgcattgatatgtatattaagaagtactatttcataatttcaaggaccaccagatacaacaagtcataacagccttagtcataacaattcttaggaattactgagttccatttgagttttcttggacttcatcaactatgtaaagatgatgtttatatggatatatagatatgtagatgagtatgtgcctgttatgtagttttccatagtacaaaaagctatggaagaatcatgtaaaacctcaaatttacctgcctgagtttccacttctctatcagtaaagtgtgcataataatgtctattccaaagaattgtaacgatttaaaagtcaatgtttgtggaagttcaaggctaggcatttggaagttagtatatcctaatagctttaagttacctggttttgatgaccttgcatcactttgggtccttgcttcttgggatctttcttgacagccttgctcactggtatcagaaggtggtcggtatctaagagtgggctctaatttcccatctgctctttctcaggaagctgagaaatggcagctggagacaagaagagagaaacttctgagaaatgtatgtgtgtgtatgtgtgtgtgtgtgtatatatatatgtatatataacaaacacatccacatacatatatacatatatacttttaaatttccatatgtatacacatttttttgtttatgcatgtatggagatatatatctccaataaattgtgtctaacttgttaatggccaaagcatcttcccagcttttagatgaataaatggatattaaattctacccccaacatgctgtctctggtaagtagagagcttttgagttagttcattttggagtcttaagctctctcctagggtaaatccattaattatcagataggatggagtaccagagacatcgcctgactccttaatgagtttcccataaacctgggctattcagtagaggtcaaattgataaccactaagaatgaatatcaatgccttctagagttctacatggaatgtgattataactaccaaatggcctctaccttatcacactttcagaaaaattagtacttcaaatgctcataatggctaacttgaaatcagggattttttattatagttattgtcagtgaatcaggacatacgagtcctctgacaacaagctttatgcatcagagaactaattcttaattatttgttcccttaaatgtacagttaaattgtttttcctgaagtcatttttgtggtgttttgttctggatctggaattttcagatttaaatacttttggaactctttcctttcccctcagtctattccacctataagacctgaagtgcaatgtagttatatttcagatgaaggtactgactcattgggatatggcccagaattaggatttgagaggacttgatgttctccctgtgcaaaaagtgattgaggatccacaaaacttcagaactattccatttgatttgtctttaactgggcaagacaagacaggctcccccgcactcaaacaattgtcgagtaaacatgcacactgggctctattctagcccctccccttctgaaacaaatgccatcacaccttgtcatgaaactgttgtatgacgatcttttccaacattttgtctcagtgatgtctgtaatttttttaatttttatttttgagacggaatctcgctctcccccagactggagtgcagtggcatgatctcggctcactgcaacctccgcctcctgagttcaagcgattatcctgcctcagcctcccgagtagctgggattacaggcgcccaccactacggctggctagtttttgtatttttagtagagacggggtttcaccatgttggccaggctggtctccaactcctgacctcaggtgattcacctgtcttggcctcctaaagtgctgggattacaggtatgagccactgtgcctggctgatacctgttgttttaaaaatcagttctgagaagctgtcttattcaaatattgtgtaccttctttagtgattggatggaaaaattcatgcagaagaggaaagctgttttatgcaaattgcaatctctactaataggacttaagggaaagggacgtcctttgtaaaaaggaaaaaaaaataaaaagagaattaccatattctttgattgcaaagaaccggctttggggatttgcacttgtaagtctaatcatgataatatttaatcataagagttgcggtcgattgttttattgctcccaattattcactgccctccctgtagtgggattacactttcctgcccttactaacaccaagcttatccactggacttgcgtggcttaataaaatctgagtggaaattgtgagcgccatcctcctaaccacgctacagagtccaacgggatgccccaatcctatgccaggccctgggtcttattgcacttttccgcacacaccactagccagagaaagagccaagccgcagaaggtccctggcgacatgagtgagagctgagccttatcactagtgggcacagatgctggaggtgtttgtcaccacagcatagctgaaaggaaaccaatagaacaataacattaatttgtattgaaccagatattctttccagtgtgttttctgtatctgtattaattcgcttaatcctcacagcagctctgttactatttgtatcttggagatgaggaggctagggcatggagggtagccagtggcagagccgttatcgtcacacaggctgaagggtgtcacatccaccatctgagccaccagcctgtcctttgaagcagggcaggacaactgctggaacacacggcaacctctcccttggactctttgaaatacaagggatgttctcatggaggaattaagtcactggcaaatcaggaaaaccagacattggaaagccaaacacccagagcctagccctgaatttgggaaatgttttgtagcttaaactatatttgccaggatacattaaaaaggaaaaaattaaaagacggaaaaccttgtggttctcttccagttcccaacatccatatatcaagaaccttgaaatttaaattaaaatccaatggatgtgggtgaccaagaaagataccaaattatacccaggtgttttatctttcgctaattgatgagtttgtcataagggttctcttctcgataaaaagagccctatattctaaaataaacttttaattttagtgtaattgtagatttaatgaaaagttgcaaagacagtacagagggttcttgtttatctacacccaggctcctacagtggcagcacctatatgccaggggtatgctgatgaaaactaagacaatgatattggtacattacccaggctttggccagatttcaccagtttttccagtaatgccctttcctgctccaggatgcagttgagtgtcccactttactggtaatcctcatagctcctttgtctctggattctttccctctgctctgtggcatgtggtgggtttctggagaaaaaaaccagggctgggcacagtggctcacacctgtaatcccaatgcttcgggaggccaaggcaggcggatcacctgaggtcggagtttgagacaagcctggccaatatggtgaaaccctgtgtctactaaaaatacaaaagttagctgggcgtggtggtgcttgcctgtagtcccagctactaggaaggctgaggcagaagaatcacttgaacctgggaggcagaagttgcagtgagccgagatcacaccactgcactccagcctgggtgacagagcgagactccatgtcaaaaaaaaaaaaaaaaaaaaaaaagaaactgaaaaaaccaggaagagccttcttcctaccagcttttacagacattgtttgccccaggtaagcaaatgttcatgtagttttctccctgaaggcacctgtctctccaaacttcagattggttacttgctttgtttgtttgttttttggtttgtttgttttttgagacaaagtctcgctctgttgcccaggctggagtgcagtggcgtgatctcagctcactgcaacctccacctcctgggttcaagcaattctcctgcttcaccctcccgagtagctgggactacaggcgtgcaccaccatgcccagctaatttttgtatttttagtagagacagggtttcaccatcttggccaggctggtctcgaactcctgacctgaagtgatccgccaacctaggcctcccaagtgttgggattataggcttgagccaccacgccaggctgtttgcctttcgacctcagttctctgaagggttcactaaaaggcatgcacttgtattgtgtccagttttatttcttataaaaatgggagtgatgcttattccagctctccacaacttcaaactgaaaccagcaccactctaccttttttgtaaacaaagcacatctttagtctagaaatgtcagtactagagaacttaagtggacaaatgctgaaaatatatgtagaaagttgttcattaaaagtcattataatagtaaagaactagaaacaacttaaatgttaatgaataagaggctagattgataaattatgatacaattatatacctgaatgctctatgtcactcacagtaatgtgtagctctgcgactgtcaacatggacaaatacttctgacagattatcaggtgaaaatttagattccaaattgcacacctgtctcccaagcccaattacatacacttgaatgggttcacgcgtgactgtgtgctcatgtttgtgtgcagcagttatttgcagagggtgagaaatgtaacaatccactttactgaaatgctaaaagcaattgccaattcatgataagattctacagaaaattttactttatgcttttcttcattgttcagttttttagaatatgtatttagaaatgagtgggtgtttaaaatgagtatctatagaaaaaatcaattttcattttcaaaaagaggggaagggaaagcccgttactgtgtcagcctgcacaggagttggggtgcatgtttcagagaagtgcagataagcatgccctagttgcagtaaatgtatctacaaggaattcaaaagcctcttggcataaagtttccaaagccaaacttatagaagtggggccaagcagggttgtgattctgagtgcaggctctggagtccataagaccttggttcaaaatgtggttttgccagttatgagccaatggctttaggtaagtgtctggaaaaagtcaaatcttttttctatcctctcattcaacaccgcaatcattaacacagaagacttatgtgcccaatgtgtgagggtttctcccgaccacaagcaatcaactgattcttcagcagacaccaggtgggtgtcctccagttcaattacgacaccgtctacccggagatagcgtcagaccccaccaggtgaggactcagctgctaaaacttccctgactccttcagaatcagtcataagtccaggcctttggaacttctgaccactggccccaagttgggatttctaggaccctctcttttgtggtcaattaatttgctagactgaatcacagaactcaaagaaacacttaggtttactggtttattaatattataaaggatattgcaaaggatacagatgaagcgatgtgtaggatgaggtatgggggaaggggcacagagcttccatgccctccctgagtgccactcttcaggaccctccatgtgttcagctacccaaaagctctccaaacccagtcctcttaggattttacagaggcttcatacatcgacatgatcaattaaaccattggtcattggtcatcaacctgatctttagtctctctcccctccctagaggttggggatgaggcttaaagtcccaacccttgaattatgtcttggtcttcagcaaccagctccctcttgaagctaccgttacatgcttatgtgcttatatcattatagcttatctatctatatatagttatgtacattatattataaaaaactatatatggttatatatatatcgtatataatcatatatgttatatgcttattatatcatatagatatatagcatataatgcattatatcatcatgtgctatatatcatatataatatatatacatatatatcatatataataatatatatatagttatgtgcttaggtgcttatatcattgtatgctctctgtatacacagagcatacaatgatatatatgcgatatatagtatgcattagcatacaaactatacacagatacacataccacaagatttgccttagcatataaaaagatagtatgttgaagactccaaggattttaggaattgcatgccagaaacctaaacaaaaaacaaatacatatttcacaatatcacagtaaattacttaggttcttggaacttcagttttgtcatacttaactagtgagcatgaagttttcctcatgaggttactatgcagatgcaatgaaataatgtatgttcagcccttagcacagtgcctggcacatagtaagtgttcaacaaatgtgcatgagagttcatattagcactaggtggtgaggcccatgtgttgtaaatatggtttgtgagatgatgttatgcttttcctttaaaggatggatttcctggctgaatctctggcttgtgcacttgtgcaacttctaaaaaccctccaccaggggcacttgcctgtgctctgtgaaagtggctttaactcattcatgcctgtatggcggtgcattctcccactgcaggctcaaggtgggaagttggaggacagtctcttccatagcctgcacagcatatctgaggaataaacactctgaatgttctcccctatagaaaaggaagccacagctaccatggtctccccataccagtgtatcaattaaaccccaaaaaaaactacttcaggaggcaaagaggtggtgaacagcactctggcttggacctgtcagcaaaagccactgctgacagctatgatagtggcaacataagcatggctgaaagacacccaccgaggaggcttgtggaattctactctaaaggagagtaaggcatggatcaggctgtatcatcacagaaatccacagcacagccttccctcgccctccatctcacacgagtgagaaaccacattcgtgaaaatgattagacaagtccagtttgcagactcttacccggacatggtcattttattcttttccatctgaaatccaagtagccagtggagacagcagtgtatgtggttggctaattcctacagtgctcataagttaactaattatttccatggtcattaaatcactcttttccatctgtaaagccctcattcaggcaagtcggggatggggaccaccctctttgctttgcagattttccagccctaatgagcagatcaggccattactgaggcggagatgccatgtgacaactctgcagagcatgaatgatgtcagcatgtgggactcagccggcagggacagcatggcagggaggagcatgctctctcggcccggggacccctgcacattagccaccttcaccactgagtggctgcctgacgttggacgtgtggacttttctggtctcagtgtcctcctctgtgaagagtttagagttcttcactcctagggccgtagcctgcattggatgaatgagctctgtgaggttcgatgcccagcacaagtaggctcaatgcatgctggttgttactctgtttgcggccagaagcacaggagatcccagtgggccccaggaccctgtgagcctttgacagccttgaagaatgtagagggacatcctgtggcagtggaatgggaacacaaggattatacagtaaggatagcaaggggaggtggtgaggccagcctccgtgagaagctgggtaggagtccaatggaagacaagtggaagatggctggatgggtagtatgaagcaaggtcaccagagaaggaggccttcaaatgcaggatgaagactttggcatgggagccgggcaaggtggggtatgcttgtagtcccagcactttgagagacagaggtgggaggatcacttgaggccaagggcctgagaccagcctgggcaagataatgagatcctgtctctctcttaaaaaaaaaaaaaaagaaagaaagaaaaatagtctcaactactcaggaagctgaggtgagaggattcattgagcccagaaggtcaaggctgcagtgatccgtgattgcaccactgcactccagcctgggatacagagcaagaccctgtctcgttaattaatgaacaaataaataaataaatattgtcatggggacaggcaagagagactagttaggaggccattacagtaaaccacaaaccaggggctcaaggctggtccaggaaagcaagatgtgagaggagggaaaggcccaagagctaaggcagtgagcagaagaatgaacctcaattgaaaacctctgtgaagtacggaacatcaacgaaagaagcctttgcatatttgttttgtccccaaagcagacatatacaagagtaccttgactatcaccaaaaagatcgccagtatagaaaatacgtttggctgacgcaactgatggagaaaacccttcaagatgctcatgaactttgctccaaatcttacaacacaactgaagggaaccacaactcaaatggagttatgtaagatttcactgtccatttgtgctttaaatgcattccatcatagaagtcagaaaagctcaaatattttaaaatgtgaagtaatttttttcttcaattttacttcattaatcccttccaaaaagtctactttcaaaggctcaagaaattaggtctcacttttaaagaatggagaaatggcaggattgccttcagaaggctctatggccaaacaccaatactgtcagatatgaaaacactgatgaatcaaagtctgttccaagcatctgccaattttgatgtaaagccctctttctgtactgatgagcctgcttgactgacaatacagtaacttttttttctcaagtgaacgtcttgcaccagcatcttaaaatcgttagaagaaatgggatgaaaatgttcattaaaggtgatgaagaaatttggatgagacctaaaacagccctgataagaggggactgaatcaaaggcatcaaaggtagggcagctgctccctgcaaggttgcagctggaaggcgcctgttcaggtaagagcttaattagagctgtcagtcacactaattgcctgtgattaaatggcgtgagtcagcagagctgggcattggcccagtgatgagcctgcttcatccattgtgaactggggacccgggactgcgaggcttaccagtgacgagcaagcgacacacggtaagcactcccagatccttccatcaacacccatccgaagcacttgctttctccaaacaacagcactttgttttagcatcatcaaatcatgtgctggaaaaaacttccaaatagcccttacttgatgtccatgtttccaaggttgggctcagatttcaatgattaataagcaaacccttaccatcagctatgaaagattggtcgcctttgaatggcaaaggttttcttgttttttgaatttcttcactatcctgcctcttgatagcccatgcccactcagattgcccagctggtgtttgatgatgagtatttctgtctgagatctcttcctgtagtctgttttcccttccaaaaccagttctaccttttcccaagaaatcccttcaccaccatcacttacctccatcgggctccttatttccaatagaacccacatattgggggaatagggccacttcaaatccttcacgtggctccttcctcaccctctgtctccccatccatcactccttagctgctctctgtctatttcacctccatccagaactgaacacaccctgcccagggaccactggaatccaactgggtgacctgctgttcgaaaggcaaatgtctgtgcttggttcctatttgtggccccatgctttttaaaaagtatgctacattaaaaatatttttaaaatatctagagtcaatgctcggaaaattgttattgggtgaacatgagtacctacgtttttctgggcagaatagaaagtcctggagagggacactgcaaaggatctaaaaatgtctgtgtctgtttgcatctgcttgtctttgataggacaccaagtaaagcaataaaaatgttaatattctcagtcccgcctctgcctcatggagtctctgaggctgtgacagcaataaggtaggtggagaagttaaagggaaaaacaaattaggtcatgagaggataaagagacggattttcaataggcttcgaccttcagagatgggagggtctaaattaaatggatcatacaaaattcaataaacaaggattggagatggcagatgatttatcctattataatttgaattaagctggagcatcaataacacccctgaccctaaggttattaagagacagctattaacaggaacagaaccagcacacgctgttgatgactgctcagaatttagggctcaggcatttagggctgggggattgattgtttgaaagataaatttcatctttggtgctgcagagcagagcatgggaggatgagcaactagtgttatcccagagccaccagcccacagcccactcatatgtgaccacgacagcatcacgttcccctcggcttggtgaaactttagacagattccatcctgactatcagcccctcacctcccttttcatagagcatttactttagaaaatgtgcaattataaatcctttggagctacaaatcttcccccagattctggctcattttacaacccagaaaatgcctttctcaaggacctggaaatcgtctctgtgaaatgtaaatggtgaaggagttggcactccaagctcccagtttctgagactaggagcctcccctgactcctctgatggatgcacattagaaaacacaggcggcctaatcggagaagaacgtttgcaagctcaggaataactcggcctgctggtcacatcccattgagcaacctcccctccactgacatcctcccatcctttccaccagctcatgccagcattgggaaaccctcccaccttttgtatcatggaagttgagctcaggttctctcctctattgcaatagtctttagagaagtcttcctggcctgtttaactttgtcctgtacagtttttacttttacttttactttgacaagccatccgtggaaccatttgctccaagcccagatcactggctctcaagtcagccatcctgtacatgcagcaggtgggtgagagatggttaatccagtgtcattatttctgctgcaatcagatgactcagactgtgttccaacatgaaaaacagaccaaatcaatcacataactgggttttgtgagtctcagaggaactggtttgatggaagttcagttccaaggccactttcttcttcacgcaagtctaattccaccctccctgacatccggtttgaattagtcaacttggctatttggcttgatggaatttttgcttttcaacaccacttgggcattgtcaaattacatcataattgcatcatcagaggctaattgtatcatagtaatgggaacacttttgagcaatgttctgggctccttcatgtacttgttcctttattcataagggaatgcccctcacccatgactttcttccttcaccagggaaaatactgttgtctccatttcattgataaggaagtgaggcatagactgagtgtcttgtccaaggtcacctgcatggatggtgccagagctggaattggagtccatgcagcctgcatgatttcacaatggaatgtaataaggattttattttatatattaggaatcccaggatgaacacacacacagggaggatatctagagagctgtcaggaaccctggggaagaaacctgagggaccaaaggggacttctgctggagggagatctaacctggtagaagaaccagaggaaaggcactgtgtgtgcccagaggccagcagggcatgggctggggagtcagaagaggaggggccatggcaggactgttgagcttggccacctcactaaattctgcagggcttcagcacccctctgaagcacacaggacggtgccaccccccttctaacaacttagacacttgaggacaccactgaacctcgaatgtcaggggtttcagtgccgtagtgattgggtgagaaccagtccacacaaacatggacgtgggcagcagaggcacattggggacaacgatggtgcagcggcagtgcctggaggcaggacctcatccaagagcacacatgaacacccacccatctctggattttcagatattcttcaacaggaactttccagggagccaaggggagtaggcaaaccactgaagattgctttgcgggggcgtctgtctctcattctgtactcaccagccagcgagggctggggagtgcctggccttgctttaccagctcattcaccatccccaccaagagcaggagccatccatgccaggagtcacccatgccagtatctcccgtaggttctaacaaaaccaccgtttctcatgcggggcctttccgtgctttggatggcatgaggacctgcacatgcaagtcttgaaaactgccaggagaattgtgtgttagtcagtgaaactattacctgttcatttgataagagaaaattaaattattcagttcccaataacacaagcaacatcccagccataatagtggagtaattgttttacaattaaggcatgcccagaatgtacattaccaactcatttaataatgtgcgcattgagtctcttattttttttccaaagaggcaattcaaataggtaatttagtggtagaaataaactatgaatttaacttatatgttcattaattgtacaattaaacagaatactaattgactgtagaattatagctaaatgggacagtgcacccgggtaattagttctcgttctgtttttcattgtgaacataatttttggtggtctcaccctacccaattaggttttgtttggctttattggagcataaatcactctcctagcgcaaagatttaatcctcacagtacagctggtgtgttacgcccctgtcccaaaaggttatctctttgcttggaaagaaaggacatctgatcatagtcgtcaggaatgggagggtgttgtgcccgtctgcgattttcagtgtcttctctgcagaaggaagagagaaggcagacagggtaggttagtgccaatagcgtctggactccccggaagtttccgcccaagggggaccgggatctggacaaggggttcaccacctctacagtttttactcactgaaacgatcaattttataatacccagaactgccactttctaacaggtgatctccgcataggcagccagctccgagactgaggagaacagacgtgcaagaaaggtgcccatgcagggaacaaggtgccttcccacggaatcaacgtggctctgcagttgacacaccactcccgtctttcctgggggcagcatcctcaggtgctctctccttgctctgattcagtagccggagagtctgacggctcacagtgaatttctggttcagtgcttagatacaaacaggcaggttttgcttttctcagctgctcagaaagaaaacaaggaaaatgtgaaatggtggttcccttgtgacatatatgttataccaggatagagtgagcaccagggtcacaggagtgactcgcggccacgcagcaaagcagctgcagagcagcaatccctatgccttcagatgtgctggaatcccccaggggtgtgggcagcaggctaaaatgcagattccctggcagaggggctcccctgtgatgctaaagaagctgaaacttctgggcttgtctcggacagagttctctggtaggcagtgtgtgaaattccatagctgccctttgaaaggccaagcctggcataaagtcggatgtgaagacaggctcttccccagtatccttctcttaacacagtgcttctgtccaaccacatctgtctgagtcaacccacaaatattgagatctgccccagaaataaagggcactgctacagcagacgacaaggcagtctcaaatcccagagtgtggggtgcaggccttcagctgagctcagggaccacaggaaatgtcgctcagtgcccagtctgcatttctaaggacgctccgagtctcccctgcctgacacagctgagctcctagtgttcagaagtctcctgtggcttctgtaacaaattgccaccctcttggtggtttaaaacaacacgaattcaatctcttaccgttctggggattagacatctggaggttccaggggaaaatctgtttccttgactttcccagcttccagaggccacctgcacaccttggctcatggccccttcctccatcttcacaggtagcaattacatcactcccacctctgcttccatcctcacatctcctactctgactccctcttcccctgataaggattcctgtgattacatggagcccacccagacagcccagggtaccccaaatccttaactttctcatatgtacaaaggccctttggccatgtatggtgacatttcaggttcccagcattagaatgtggacattcgggtggatggattattctgctaatattccccaggcagaaaaaaaatgaacaatattgcccagatcgccgacactaggaaaaacgaatgacctttctggaatcctttagcatccttggtgttcgctgcttgtcaaactccccaacccactctcgggacacacaacattgagaaaaggggagcttgggagcagccgggatgtgctatggcagacattcttcttgctgcctgtagagaggatatgggtgggacagatatttttgctttgttcttttgttgcattatttagattacgcaaaggtatattcccatgaaagctcattgatatagcagtggaagtcggaagggaagagcctcaaggtaattgctcaatccagggatggagcgattgctcagaatgtcattcactttgccacgaagttcttgatgtgacaaggtctcaaactagaaaatttctgaaatgattacttgacatgaaaggcaaagttgtacaggcagtgtaatcaagcaggcagttggtcttggttcctgagagtcagtaactaaaaactgaaccaagaacacaaacttacacctcctaaagtcggttatttgcacacactggctgctgcgcctctgcctgcccggccccttggatcctttttctttattttgttcctaagtactgagcacattttaacatcccctataacttatttattttgtttatcatttgcctgctccatgagatcagggattctgtcctttgttctctatcccaagaactagatacttgcctggtctgtaggtgactgataaatatgtatagaacgaatgagtgtgaaacgccatatgattagtaggctgcatttacttagcataagggaaataacctctctatgatagtgttaaagctgcgtcgttagtgccgtttggagagtatgatttgttaaaggtgcaagtcaagctgggattccttagggctctcttgagtccccaaatcaagccaagcaatggaggtttcagataaaatctggtcagcattctgccgtaaatcagtatctcccaagtttccactaaaatatttatagaggcacagagaaaagttgaaaaattgagaagccctcacacaatactgatgaaaaagttaaagatatgctattataaatggataattatagataagaaaacccttgttaagaactatagacattttctaaggaaaatatcagagctaccaaaatagaatcaatcatcaatgacataattatagaaaaattgctggaactgtaacaaagatctgagaacacaggcggcaagcgttcaccaaatttcaaagaaaaccagtaaaaaatggaccagatttcgaccagatttagacacatcttggaaagtatttaaaataataaaataaagataaatgcaaaatactagatcatttttaggaagagaaaaatatggctacataaaaacaaatacaaatcagcatggccccagcttgttcttttgtcacactcctgcccaaaggaaatagagcagcaattgcagaggttctgaagcagagggagcaatccaaggaccccactcccacatgtgtgggggtgacacatgctcatgaaatttacctcccagatatgctttcttggtgttacaaaaatgtagccttcagccttaataagagatacacttaagaattcaaggtattggcccggtgcagtggctcacgcctgtaatcccagcacactgggaggcctaggcaggtggatcacctgaggtcaggagttcaagaccagcctgaccaatatggtgaaaccccgtctctactgaaaaatgcaaaatgagccgggcgtggtggcacatgcctgcaatccaagctactcaggaggaggctgaggcaggaatcacttggacatcagcgtctttaaaagaaccttattagataagcagcccacatctaactgcattctaactggatgccctgcacagttgaatctagaaggatggttctcagtgctgcattcctctggggggctgacccatgcccagagattctgactctattccacagtcaggactgagagcaactctcacagctaatgaatgattatcaaaatgaaataatttgatcataaattatccctcatccatacagtggggaaaaggcacaaaacatgaggtccactgcatctgcctcacagacactgggtgagcattcccttctttcttctcttttgcattttccaggtttttaaaagaaaaagacattcttttcagtgaaaacaataacagcaaaagttttctataaagagccaagttttatgggtcacagtgacctgctaccaattcattctaacattcagctctaattagaacagaaagccctgtacttttatctcactcttacaaatcttatcaaatgggaattgcgaaatgttttccgaaacttttctcctaggtcccacttggtcaaaataagcctttaataaaaagactgaaaattagtttgtagccaggagactcctggaagtttggaagttaatctgtagttgaaaaaaacaaaccaacaaacaaacaaagactttcacacttgtttagctctgggcttttctggttctgctatttattgaccttgaaattaaggcaggctgtctagcttctcttagcttcagtttcctcatctttaaaatggaagtgatggactgggacagtgactcacacttataattccatcactttaagaagctgaggcaagtggattgcttgagcccaggagttcgagaccactcctgggcaacatagtaaaacctcatctctacagaaaatactaaaattagccagatgcagtggtgcgggactttagtctctgctacttgggaggctgaggtgggagaatcacctgacactgagaggctgaggttgcagtgagctatgatcacgctgtccactccagcatcagtgaaatacttgaacaagaccatgtctcaaagacaaaaaaaggaaataaaatggaagtgatgatatctacttcaaaacagcaaagacaaaaataaactaatttaaggaaagaagagagactctctttctcacgatatagacagcagagacaggtggcagtaggaggctctacttgtatgacctgagtggaccttaccccttgacacccacagtagagatgattttggaatgctctgccactgagcacgctgcttcatgtctgattaacttcacatttcaacaacacaacaatcaaaacaacaacctttagtacatggggtggtccccaagaccacgatcaggatgaataattcactagacaaactcatggaatgtgagctgtcatgcttatggtcatggtttatcaggatgaagggactcgggttaaaatcagtccggagaagacaagcatagggcagggtccagaggactccggatgcgagctccatttgtccctcccgatggagtcatatggacagtgtctactcctctgccaaggatgtgtgatagcgcttagtcagtgtcaccaaccagcgaagctcgcctgagccttggggttcaggtacttaccgaggttggtcacttagcctttggtttccaggctctctgaagggagggtgagctgttaccatgtggctcaaggtcccccagtaaacaacaacactcttaccaaacattacatgcccagggctcagagctggctgtcaagaagctgggcaagggtccgtcttttctctgggcaaagttaatcctctaggctcacctcttatcgaaggttcactatttgaaaaaatcaagacgtctatcaaggataaagacccatcagaaaaatgatagaagggattctaggactctgggagacagctgacaatggaaacaattgttaacatttctaagaggaggttttggatcttaaattaggaaactgactatgatcaaatcccctcactaaatgctgagaggtgacaaattggactttccagaactgacagtctagacaaggggtcagggaacgtttcctgcaaagggccggatagtaaacgtttttggcttttgcaggccacatggtctctgttggaagtacccaaatctgctgttgtagagtggaagccaccactgacaatatgttaacagaggtgccgggttccaataaaactatttatggacattgcaatgtaaacgtgatacaattttcacatgccatgaaatattaggggacttttggtttattgcataagtgaagctcaggggacttgggcagtgatggaaggaagtaccttcctcgacactgtaatggtgaatacatgtcatcatacgtttgtcaaaacccatagaaggtacagtgccaagagtgaaccctgatgtcaagtatggactttggttcataatgatgtatagtgctggtttgttagttttagaaaatgtccaacactagtgtaagatgtaataggaaaacatgtgtgtcaggccccatgggtagcagggaaagatatgtggaactctatgtactacctgccaagttattctgtaaattaaaactatattaaaaatataaagtcttaaaaaatgtataaaaagcattcttagctcacaggtaataagaaatcaagtggtgggttgggtttggcctgtgtgctttcattgtatatgaaccttcagacaagctgggacaaaagctcacaaacgtgtgtggccctcacatggggcagaaacgatgttgtgggtcggtcccatgggcagtggcaacaagtgagcagagtcaacatgggccagaggagggttcttgatgggaaacttggatgggagccttaaggaatgggcaattccccctacttctttatgctgtttgctcaggatctaatttagaaacatgagcaggacctagaagcaacctgagaacccacagggcgtgcatgaataattttgacttccttgagcttggaaaagccattcttcatacttgctgttggtctaaatagctgtattatttgcggcagaaactttgcaaaccaggcctggagggagacaggaatttctccagatattgtgctgcccttaataagctgttcaccctcctggcttctggaagatggagtaatcaataaggcatcattttgaacagtataatcagcataatttatttggcaaacacatatgagtgcccactgtgtgctcatggctctctcggctgtaagagcttatggcaatgatgaggtgatgttggaaattgctggtcgaaacctccaagtaagagaagaaagaagtggtgtcatattgatctcatggaatagattttaatgctaatagattttaatgcaacccaatatgctccctgtgtggcagcttagggcctggttaacagtcgtctgtgactgtttcagctgagcctcactgtgcatccaattatgagaacacattaatcagtcacttgacaaaatacgtatttattgcttctgatattttcattatgttggccaaggctcaacctagttttataaagaaaaggaatgagccggttgcccacagggatgttgagaatggagacccctctggtttcccacctggagatggtcagcagaaaccaaggcatatcctaaaatgttggtctctgcattctcactattctctctccttggacttcagaaggaatcaagacctaattactatctctactcctgtgttgagtggttactgtgattacctggtcaataactcattgtctatagatttcaatactgcttggggattttccattactctccatctacagcagtgagaactgtgctgtgttctacaggacctcttttctaggatttgccttctatctggaggcttaaaagaaggactgagcaggcttagcaaatggttcagggtgtgggagcgtgagtcagacttcagggatccagaatgcctctccagctctgcgatcttggttatgaagttatctaacttcttgcgccttcctgcaagtcagcccacctgcaacatggaactaacatgcatacctatttgtaaagtgcttaggatgattcctggctcaaagtgtgcaacaaatgaatgacgtcagtaaagagaccagagcagtgagaattagtcatgtccagagcacttttgggaaagaggagaaaacgtgagaggcggcctgctgtggggaccgagttcagcatggatttcacagctgaaaacgcatacctggtttccaaaccacattttcaatgactgcctgccccagaaattgtgctgccttctgctaatgatcttcaggttccccggctacttttaatacagacattcactgctgtctggaatattaagaatatcccgacaaagggggctgtgtctgcatccttatgctccaagtccatgtggtcattaagaactgaaccagttggagcccctgggcaggtgggagattatgcaatagggagtgtttctctgtgtgggtcctgggctcaatgcccacagccccttggtcagcctgtcggctccttcattctggccacacatcacaacagtccatgaatgcagcagtgacagggctggcggcctctctgagtcattgctcttgctccaggaccccttgccagcctccctctgtggctgttctcatccgtcataagagcgatggctgacagctccaaactcagcctgtaggacaaggctcacctcctgcctgcttctttccctggctagtcttctccttccactgcagcacttggcttccccaccatccttctatgacactgaagagtttacaggctgatgtcaagggctccttatgacactcagtgtggcgggcaggggggttctcgctgggcatggggagtgggaggccaaggccactgagcagactaacaaagtgtactgctggagcccagcatgctcacctctgagggtcagtgtgagtcctttctatctgatgatcagaaccacctccaccaacatatcgttacacaagcacgggtcctaaatgaggattggctcagagctacacttctgggttgcagagcatctcatgtggtctctgggaaagtaagtatgagaagttcaggggaccctctcttcctctcatcttcactcccaccagtgatcacagcttaacctgccactatggcgggttagaataaaaaaggatggggtttgttcctacctttgaaaacatcacagagagtcaaagggaatgtttccaggctgaactagacaccgctgagtgacacaagcaacaggaaaacacatcaagaccatcagcggtggcgtttgaaaagcaaatttgatccatggtagtggaaaagccagcaagtccccatcattgaaagcaagcttgccttttaactaaaggtctagcgagggtcaggcatggggagatcttggagaagggacatcttcagggaaaaagtaaggaagagtaatgatttgaattctgccattaaattccacacagggaagactggttagcagccaagaggcagtaatggatgtgtccttcccctcgttgggtaccaggcttccaggtcaggcatccatgttgatcctcaacaggggttcaataaggcagctaagacagggaaccaagaaaagaaagtggagactgatgacaacctatggaagaaccccataggatccagccaattccacttcgtcccaccccatgggtaaccaccatctgcgggcaggaggcaaccgagccgaccagattccatgccactctccagcaatactcaaccaatccttgctatcatttcttggtaccatttgtaatttgtggtttcatattgctaagtcagtctcatggggagaagacaaaagaaatggggcaaatcatcatcataacaataaaatggagaggcaagaaggagcccacttcagtcctttcactgccgagagctactgtccatgtgaaaggatgacttgaatatgatcacattttgtcaaagccccagacaattcagtgtggaatacacattccatagtttacctttgctgcaatgaataacctatccaggaaccacattcttgagacactgtctatcgatctgcctccttttacaatcaagaatcaaatacaggcgatgggcatcattttcctttcaattgtatctttaaaaatggctttttcaattttgctgctttaataatggcctgattttcactgtagatctcatgaagggtatggcaagctcacagataaaaacttatgctctaagagataacccatctctctgatgtcttgtttttctgtagactcagaaatatttcctaccatggagcttcactgccaaaagggtggccccggggccaccagcattcttatggcaagggagctcctcaggaagacagaatcttgggctccacccagaccagctaaagtcacctgcatgttttatttagatctccaggtgatttgtgtgctctttaaaatttgagaagctctgctatagtgcagattgatagcagctgcactgcaccacatgtggcatctggtccacgtgatgtcattcccaacgaacaacccctgctgcagctagacacctggctgatgccccttaagccaatgagtcagaagcccacagaggcctatggtttatcagaggcaaacacaggcaaagcattgcctccaactggacattttggagctcacttagaatatgttggcttatcttccactccagtcactaaaacgccttacaaagagcccctctaaggaagtttaatttcaatagggacgatgtcaggaagctttgggagaaccccgataagttcaactttgttcttctgcttcctctccacacctccttccctttgccttacaatgtgtagtgttttatttaacattttgtaattgcagaatgcatttatgctttatttatcggatgtctctctataccttctgcctgatgaaaaatgatggaggtggtgcaattgtgggaagcggaggaaatgaattttagctaatgtgtttttgacatccaatacattgttttattttagtatcaagacatacacctggttagtcggccatttagaattaccagtaattttgatattttctatttgacatttcagggcatggagcaactctgggagggagaacattggtattttaaaatcaagtgcgatacaggagtgcagttcagctatttgctttgtgctgatgtttacgctacctacaggcaaaaaaggaggtctttttgaaaaagaaaagcacacttacgttctttattgaaacatgtaattgagttctttatatatcagagaagcctattcatttgtattgaatggtccttgagatattctgtctattgaaaattcacatagcctctgtgcaaatgcagaacgtactcttgcaatgcctcccccgccaaaaagtaatcctttttggaacaacagttttgatcaattattttagatgactatttggacagttccagttcagaaaagatgatcgacaaaaagccaaaaggattctggctgctttggattgacgtgggtattttaggtttgtggctgtgacggcagtgaagggaggttccatctctgtcaattatctgttgaagatatccacctatgaatgctttgaagtagaaaagtgtgttcagtgtaaattaactttaacattcaaagatgatggttcatgatttattttcaaaatagtggatctgtgaaaaattaacagccacaagattccaattatctcaatggcagtctaatttatgtggcgtgaagtactttaaaaaaaatcgggaggtgtgtttagtaaggctaaattggtgttgccttgctgggtcacagcttgaagtctatctgaacgacgtggatctcattaaacatcatcaacttaaaatcgcttaggtgataagaaggatgaagatgtagtttggggcccaatagacatttttcttttgttcataaatgtatatcctctaggagcagctctgacttcctcaagcagacagcaccttggaagacaagctgtgaaggcagtcaggtgggcacatccctcagcctggacacccaggtctctggcaacctgactgttaaaaggaggttcagatcatcaactccctctttcccagagccttgagtcctggctgtgtgcaggtattgattttgggaaggagctccgaaattgatcaatatctgctggcagctgaaatcttcagatatttgctaaagaaccagatagtcatgtttctgtggacagagagggtggctggtgctcagggttccatgattaaataatgcctcatttagctgttgttgataagtgatgggtcaacgcaggaatgggtgtttactgtgattaatctaaacaggagcaactcataatgacctgttcctttggcacctgtgtaagtgaagaaaatttgtcatttgctagtttagaagcagtttctcacttctaatgagctctgcagacagaggggacttcaaacgggcttgcaaccacaaccaaaaatatcaagctgctggaggaggtggaagaccctcagaacactgtgagctttccaagtgttcttcccacactcagaaggattgtaggaaatgaaattgtaccgttagcaggcagccacatgcttcagcacttcacagcatcctggagatacaccaagaccattctctcccatagacgtaatgcctgggggaacatatgactttacaaattcagctaactagctccatcacatagtggcacagggcactctggattcagagtgggcacacaaatttctttcactagtaagagagaattcccaaacaagccccctttttaccattccacattctttggaacatattttgggaagcactgatacgataatctatactggccatcaccccacttctaggattgttgaccgattctggcatgtcttagagacagagagtaagctgctgactacacaatcatagctgcaagggaggcagattaagataaccaaaaggcagccacgtccagtcagatgataaccatgttaaggtgaaaaagttaagattccagcaagtcaagataagatacccggaaatccttggctgtaaccagaatccttatattttaggtacagagttttatttttaatagttttttctattaagttaggacttctggattctccaaaacacagcctaatgaagtgaggagacactcgtgtttgagtttctgctggtctcaggaggtaaataccagtgtgcactgagtctgtttacttacctgaaaaaggaaaaatgatcatccttagcttacaggacccttgtgcagaataatgaaacacaaaatgtggtatacagtgaatgacttgtcaataaatagtatatgaaatggcaaattgacctgatgggaatattatatacagatattatatacagacagtggataaacacaaggtctgtattatatacacacagtggatacacacaagggtctgcatgaatctttctctctctctctctgtgtgtgtgtgtgtgtgtgtgtgtgtgtgtgtgtgtgtgtgtgtgtatctgtctggtagtctcagaaccttggcactgaatgaggcttctgtcaaacccttggagaacttatctttttttctgatctgagattgacttcctcaatctgagatcctatgtggtcttcttataaaattcttggggcccattcatcttgtgccagctctgaataaaatatactgaggaagcccctgaggagacagagggatagttgttattcctacagtttagcaaatgcacccggctcatcgatttaagcatagcctaacctttgaagaatgtgggttctccctagcagtagcattctctagcaagctcagagtaggcagcaaaattagagcttgaccatttacaaaggactttcctacgtatcattcagctcagtggctttctgcctggggttcaatgacaaagaactgtgtccactcaccgtcatgatcattgcaaagtcttttctttcatttattccagggatcaaaagtcagacgggtcagatttgaatttctcagtgtcaaagaattaaccaataccctctggtggagggcaggtagaagaagacactgtaaggcaaaaagagaaaagcaagatctgaagacatcagtagaaaacaggaccatgagaatttgctccatttcctgtgagtcccttggtgtttggggcagtaccttctgacatattagaggacctgtgaagtattttctaatagggtagagaacaagccccttattacctggtgtcaggataaattataggaatatcaggcacctgaaaataaaattccactcacagtgtactatgttttcacccttaaaattacctttcaaaacatgtgcatttagttgggctaaagaatttcattttctgcgcgaagtttctcaacttcaccactcttgacatttggtgggggagggcgagacggtctctgttgtgagggctgtcctattcattgcaggatggtgagcagcacttctgatcacaatccactagataccggcactgcaccacccccacagtcacaatctaatttctctctagacattgccaaatgccccctgccaaatgccattgccaaatctctctccagacattgccaaatgccccttctttctcctcccctcctcttcccccctgcagggtcaaaccacgcctgtttgagaaatgctgtgctagggtttaaaacttgagctcaaggatacattcctggggaagtctgttgagtggaccccttccttcccagggagtaggctgctgcaatctgctcctgtgactgtaacaagtgaccacagactcagtggtttagacagtacgatgttattacctagtagttttagaagccaaagtccaacgtgggtctcactgggctaaaatcaaggggatttcagggttggtttcttcaggaggctccagggtggaagccacttcctgcctttcccagcttctggaggcctccatgctcctaggctcgtggccgctttcttcgtttccaaagtcatctgcagtgaagggccgcatcctttcacgccacatcacttggcctccctctcctgcctcccacatcacttggcctccctctcctgcctcccacatcacttggcctccctctcctgcctcccacaccacttggcctccctctcctgcctcccacaccacttggcctccctctcctgcctcccacatcacttggcctccctctcctgcctcccacatcacttggactccctctcctgcctccctcttccactctcgaggacctgcgatgacacggcccgcctgggaaatcccggcccgcctgggaaatccaggataatgtccctttcttagggccggcaggcagcaacctaaattccatttgcaacctgccttcccctttgctgtggaaagtcacacagccacgggttctgggattggatatggttagccatggcgggaggcggagggagattattctgaccaccacggatgccaagaagactcttggaataaaatccaaacccataacgtggtccatgagccctgcctgatagaaactgctcaccgcaacttccttttttactcccacagccacgcggcccttccggtcctcaaatacgcccctttccaaggcctttgcctttgtggctttgttttatttttgaaaactttagggaataaaaaggagagctggtgctactctaagaaacgcatagccgttgtcaagaattcagtggtacttttggtttcttatgtttgattaggattccatagtgtcctgcctcttgctgggcccccggcacaacatgtgtgggtgtgtaagtatgcatgtgtatgtgttcgtgtgtgtgtatgttcatgtgtctgtgagtacacgtgtgtgtttaggtgcgtgcgtgtatgtgtatgtgtatgtgtgtgtgtgtatgtatatgtgatgtgagtgtatgtgtgtgcatgcgtgtatatgtgcgagtatgtgtgcaagtgtgtgcacgagtgtgtacgtctgcaaatgtgtttgtgtttctacgtgtgtgtagtgtgtatacgagtgtcttgtatgagtgtgagtgtatacgtgtgaatgtatgtgtatgtgtacttgtgtgtgtatctgtgtgagtatatgtgaatgtaggtgtgtgtgtatgtgtgcgagtatgagtacacgtgtgtgtgtgtgtgtgtgggtatgtgagtgtgtggggggtgtatgtgtgttgagagtgtgtgttgtatgtgtatgtgtgcaagtgtgtgtgcatgcgtgtgtgtggatatgtgcatgtgagtatgtgtgtgtggaagtgtgtatgtgtgtgtatgggtttgtgtttctcctggatcttgctccctcggagctgcctgactgtcacctagcaagtctcagcttaaagtcaccctctcgtgtggtcttttctgcgcagcatccacagagcagcagccctgcgcctcctgctactgagatggagtgagattctcagcatctcgtttgctttcctcaagcacttatcagaatttgtaatttctttattagcttattccctgcctccaccaaagaagtgcatctcatcgaagaaggaatcaaaggaagctggtcgacgagctcagcatcggtccctggcagtgagcagtgagccgcgtggcacccctggcagacgtgtgttactgagcaaaccagagactgagaagcagagggcgggaaaacagtgccatgtatttctcatgagttctgtgatcgctcacaggctgggcaggaagggaagttaaaaaggaaaaaaaaaatgaagggaagatacgtgaaattgtgtgagcatccagtagctgccaggcctcatttagtgacaccgtggattgaaggacaggtgtccttgtctgcaatgcagagaggagaggtttcaagctcaaaggcagtaagcagttctaaaccgtccagtcaggatgcaaacacagcatgttatgaggatgggccttgagtccggccaaggaacaagggttaggctttcaggcgtgggactcccgctaaggcaacctccggctcaccttgctctcatcatctctctggtgctaagagtgccacctgagcttggacacctggaagccttgttcctcaaaagcaggagagaatgagggctggaccgtgctggaattccttgacccctcctccaacccaaggcacagatcatcttgccaggaagattgaggggactccatgctaagaatctgccctcctgcacatgccaaccacaagcatgaaaggttattttttaagaccattgtgagaaaaaaaattgctgccatccttgaaggcagcatttctgcctgtgattccttaatgacttcagtctctgcccttgttcatttattgttgctataattataaatgcctccgtggtttggggagagttttctggaagcaaggaggcagaaaatctattttcctgaaagcttttctttttaaattaggctgttgtttcttgtgtccctaatgccaacctaatgacatttcctgatgagatgactgtgtctgaattgctgcaattgcttctctgcagaaggcgttttcttgggctgtcctgagtgggtagagcaggggtcctttgtcttggctagggctctgctgtacagtcaccagtgttgactgagcaggttctaaaagttttgtctctgcctcacctcgtgaaggtctcacagaaattccctgtaagatagatacaattgttcttttagttatatggtaaccagtgcgatgttccaagagctttacatacactttacctcttgcaggtctcagggaaaccctccatgagatagatactgtcattgtccccgttttacagatgaggaaactaaggcactgggatattaaataacaaacccacaggcagacaacttgtaggtagctgaaaccagatttgaatcaggtatattctggtaagccagctctctggaacaaaaaaaaaggtaaaggaatggactttttagcatttgccaatttctgtggtgtaaatagtcccgccatggctgactgaaagctaccaatgatttaatagctgacttgctaaattcctgaatatttaaccacatgctcttgccaaccagagggtgttggctcagactctgactggatcttagactcttggctactgggttttgcacgtgcttaaaaaggggctttaggagagtaaaacaaacaaacaaacaaaaaacatgcattttgatattctcacattcaaggtgtggggatggggaggcatacctttggatgttactggaaatactatgcatttggggaagtcttctgaaacttacgagagaaagctaattctaattttaaatttttagggagtgagtgggaagaagtttctagaattagcctatcataagaaagttctgtgactttgcaaagctaggagatctctgacttaaattatttccagcttagcagatgttcttctattttttcttctctttttatcatctttgatttggaccatacctacactccagcggtctgtcttcttggctccatgaggtcaggggagtgcccattttggaggagctggcttaccaacaagccccttctctgagaactggcccaagaacagccctgctggaggagcagccacactaaccacatccggccctggaccagtggggcactagacaccactacccactcatctccagaattgcaacccaaagatgcagagacagcattacctggtggtgagcttcgggctttcatccatgtgatttgagatatcatagtcatgagtgccgtgtgtgagcagaggaagtcagtaaaaaaataaaggagacagtgaatcccaaagatgcagatattctggctcttgagacacagaaagggggtctttgattcctggtagaagttccagcttcccccctaacattcacctgttctcagggtgccccttccaaggatcacccatgtaagggcatttgaaaggggccacatagcctgtatgtattttctagttaaggaggtagactccaaagccatgctatatcttagtccaaaagtctgccagaaacttaaaatagttcaaattaatgttcagccaagttctccagcatagcttactagaagttatgcaataaacccaaataatgcagtgaagaatggcttcagattcaaaccacatatgaccacattccaatggaggaatttcaacccaaaagagaagtttattttccttctcaaataaggattccaatgtttaattttttttttcttttctggattgatgcataataggaatcttcaggcaggacaacataatcttctgagaagagggagctcattggcacaattagttatagacacagcaggttgagcccaggttcagagtctttggtgcaagctaaacgaggccttgcaaggagacagccagagctaagagtgtgaaaagtgacaagtgaggccaactgtcctccctgaagcatgagacagttaaatggtgcaatactaaaacagtctcagctaagataatggtggtcgttgcacaactatatgaatttactcaatattacttaattgtccagtgtaaatgggtgaattctataagacataaattatctctcaataaatgtgttttgaaaagattcattattggccaggtgcagtgactcatacctataatttcagggctttgggggaccaaagtaggaggatcacttgagccgaggatatagcctgggccacatagtgagactccatctctacaaaaaaaaaaaaaacaccaaaaaatagccagacatagtggcacatgtttgtaatcccagggactggggaggctgaggcagagggatcgaaggatcaagtgagctcaggagttcaaagctgcagtgagctatgatggtgccactgtactccagcctgggcaacacagtgagatcctgtctctaaaaataaacaaaaagacacattgctgaggaggccacttcctgctccttctaccatggctgtgttgtttaatttggattaaatgtgtcaaaaaaaaaaaaagaaaagtaaaactttttcctacaagaagcaattatgttagcttagaatttggaacatcaggcccaggaacttttagtctaaggtagattgaatagctcaatgaggttatgcagtagctagctctctcccccttgttcacctcaccctgtcctattacagttgaattattcaccatggctaggaaaatgaaccatcatgtcaaacatgtggcttccagcatggcagttaccagagagagagccaatgttttcattcactttccatagaggatgtcggtttgcctaacctcttcagtgtgcccttcttgagatactgactctggccaggggaaaagagtcctgcaattgctcgtgtctggtcagaagacccgcttctgtggccaagcaagaagcagcatcctggttgacaaagtccaccaggactatgtggagtgggcaggggtcatttccgcaaacacaaaacaaggtgcagttaccataaaaaacaaacaaacaaacaacaacaacaacaacaacaaaaacagacagcaaagcaaactgaatagataaaaagcagagctatcatgggttatctaaactaagcctccttgtccatattatctggtggaccccaaatcatgcatcagatgtgcatcagacgtagactgaatgcatcagacatgggcacatgcatcagacgtggactgaactcacagcctggagctgaactcagcctcaatcagctgaattgcattgacctgcagacacatgagtgaagaaaatcagggcttcttataagccatttatctatggagtcatttgttacacagcatcggtgtggcaatagctgactgatgtactcccttttttgcagagcaaggagttcgtattttctcccaatcagaaacctctccacaaaaatacaaaacaaaacaaaaaagtaacatgaaatccttcacacaataaagtaactgacatagccataaactcttagcccattaatgaaactatgtctcaacttttaaaacccagccacacagctacagggccgatgtctttgtctttaagattgccttttatgtctgtacaacagaatgctgagcttacttggacacacttctgttctttgcaaccagaccagaactgtcaaccacagaatggtgaatgtccatccctcacatccctcttgatgaaccatagcagtgacctacatgaacagtcaatctccaccagccattctgacctccaccttccctaaggacaccatagagcatttacagtgaatgagatgcagacagttccttgaaccatgggaaaaggaaatggtcctcttagcatatatatttggtaatttatttatgacatttcagctgcgcccagtgtcctgtgtccttggggcacactgatgacttccatgtgcatgattaaaatgtgaataaggagtcaaagagaaaggtcaagtgtctttgtggatagaagttatgagacattcttggatatcatacagggaacacctctgaacatgctacttttttctaacagttaatttttttttgagagacagagaattctaaacctacagaaaatttgcaaaaataataaagcattcaactacccttcacccagcttccccttgtgttaccatcttaaagagccatcacacattcatcaaaactaagaagttattcttgccacaatactgttaactagaatatggaacttaattgaatatccccagttttcctgctaatgtcctttttctattccaggatccatcctgggaccccacattgtatttggtcatttgtgtccttttggtctcttccaattttgggcagtcttcctcagtcttcccttgtctttcatgaccttgacactttggaagaatattagtcagttattttgtagaaaatatcagaatgggagtttgttgtttacttgcgattagattattcagggggatacccctgaagtaatgtgccttcccagtgcaccctagaaggagcccgtgatgtcactatgtatttctgtgatgttaaccttgaactaaggctagtgtagtgcatgccaagattctccactgtaaacttactacttttccctttgtaattatcaaatatttggagggcaatatttaagactatgcaagtatcccatttctgcataaactctgaatgaagcacaatgaatgaaaataaattaatagctcatctgttccaattcataaactgaagtgactacctttgaaggcaaggaaactgcaaatctgttctagatactgctccatgccaaccctttcttttcaattcttgaaagcatttttaggcacctatatggcggacagcaatggagcatgctgtgggcaggcagatgagagggctcctttagcacagatgccagggttccagtgtgtgggaaagagccacagcaggcaggcagtgatgcccaggcacttccatgagcgtgtcttagccccgtcacggacacacagtcattcttaccaggggtctccctgggccccagacccttgaccttgcagctgtcctgcccacggcatccttaccttcctcttcaattggccggcctcatcttgtccctgtgggaagaagcatgtatttacagacggggccattgggaggtaaaaagagaacaattctgggttctttctaaagaaccagaacagagtttcgggctccctctatttccttatgaatgtacaaacccatgcatcggtttcctaggctaatctgccatgacaattccggttggttggttggattctctctttcctttttttttttttttttctcctcaactgaacgtaagttaaggtctccaaacagagaaattgatccaaggtttcattttcctcctctgctgtttcggctttatgaacacccgagtggttactgcagacacttttgacaggcccagcagtctggcaaattaaatcttctagcccaagcaaatcctgatctggaatttccgcacaatccccctgcctgtttcctgggtttgtctgtctcttccttgatagggtatcagtttacctccctgtgggtgagggttaaataataaaaaggttgaaaacaaaacaaacttatcttacaggcaacccaccgctactattgctttttcataacagaagagagaaatgggaccaggaagaaaaaaaaaaagaagaaggtatcgtggaggaagtaaaaaaaacacacaaggtggagagtgagacgggagtctcttggtaggtggataggcagctccgagccaatgctgctagaaaagaacctgtggttagattcctttccgttctactggggcagaaaaaaaattgtaaatgttacattatgaatgggagaactggcctggaaaaaatatgaatctcccatgacctgccccaacctcacagctacccagggccgtgcacttagctgagctgatttccctccggtccatccagcacatttctttttcatttacatctgcattcccccttctcagtaaagccgggaagcagaaggcaacctgaaaacgaactgctggccccggccttccggtcagagtcaaagtcagaacgtcctttctcacagtgcatttcagccacctctggcctggttagagcagacctggggcctcttgcaggactgatacaagcaggtgagggcaagcatcaccgatgggcagcctgggccagagagaccctccatgtgccagctccggacctgtttttaactcatcggcaacatttttaaaaataaggtatttcacataaaagtcagtatgtccaggttttggggggaatgataagattcagtatcaaggggctcctgttcccagatggaaggaaacgggcagggccgcccttcacacagcgttgctccgtccagccgctcactccctcagaactcctcatcacgcatcctctcacacgggatcctctgttcctttcattggtcgctgccagtccccgaaggtatctgcctgcacaggagagtgatgggtttgggatggaggcagaggcagagatcgatgcatgggcagaggagacactctctatcccggaacccggaggctacccaggctcaccattgttttgctacaacagtcataatttgatgaagatttaccaacaaaagagaaattagagcagattccaggttccatctgcagaagtatccctccagcgtggaaggcagtgtgataggatgctgggaacccaggcttagggctggatggctgctgctccctgagagtgggaaagtcgccctttggatgcctcagtttctccatccggaaaacagggatcaggacagaacctgctccaaagttcctacaaggagagggtgagataagggctacagcagaatgatacctaacacagagggtgcagccaggaagcacactattgtcctttcatgacctgtgcttccgaaatgcttttctgaagaaagggattagaagggattggatggtggggagattgtagaacagctctcctcatctgagctcaggagagagagcagggccgccatccttccttcatgagtatctcagaggaaatggggctgaagacaggactgtcagcggagccctcacgcccccctccctcagcagctgccagccagccagcggtggggctgtgatggtcgggggagcagcagggggagggggagttgctaaagtgcaaggcccagaacagggtccttttgtccgggtttgagggcagtgcctggtctacaaatcctattcccgacaaagatgcaggctagacttaccctgcagacgtgcttagctgctactgggcctgctcctggcctccgcggcgcttctgagactgtccaccaaggtatgcagcactcgtggctgtaaattcttaaagggtctgccttccctgctggtccgttagtctcaagaggcccaggcagcttctctctgtccacgcccctcccccagagttgagtcctgtgcccaacacacatcagacccccgatgactatcccctgaatgaccaaaccggagaccctgctggacacaggcaggctccttctggtgtccacaccccctcagggtgtttgaagggaagacttttatagaagcaaagtctgcccaaatagcatttccgtggggaccaacagtgtgctggccagtctttacctccatcaagtcacagccaacattgggtagtatcctaccacgatcacagacccaccccggcccagcgaggctaactacgtgagcactgggtgagctgcgcccacagctgcaaatcgtcatggacatagtgtatgcaaactgcttctgttttctcaaaatgcttttctctcctactgcaagcaaatcagagccaagctcacatattaatgtttcagtctcaaaagtaaaagatatacccaatccccttttttaaaaatcaagagtaggtcgaattcaagaagtagaccctgataatggaaaaaacttacataattttttaaaaatcaacatatggagcaattgttagaaaaaggacacagtctactgcattccacttaaaggagtaaatgggtaaacaccctttctgcttagttttacttataatcaggagacaacacaacttcagagtccttggactttagagtgggctacagacagttggaagaaagctagatatttgtttttgaccaaaacggaatgaacttaccgatagagagactgtcagaagttggatgatgctacatctacagagaaaaaacaaaatatatgaaattcaaagaatataggacggggaatacttctgacttcccccaaaggagaaaaagcaaggatttttaccccgattttaaagtaaatcaaaccagggcccaaatccccactctgacacttctgacctaaccctgtcgtctgtactcataaagaactccagctcgggtgcagtggctgacgcctagaatcccagcactttgggaggccaaggcgggtgaattgctcgagctcaggagtttgagaccagcttgggcaacgtggcaaaaccctgtctctaccaaaaatatgaaagctagccaggcacggtggtgtgcacctgtggtcccagctactctgagggttgaggtgggaggatcgcttgagcccaggaagttgaggctgcagtgagccatgatcatgctactgtattccagcctgggtgacacagcaagaccctgtcaaaaacaaacaacaacaacaacaacaaacaaaaccgaactctaggatggcaacttggtcaggctgtaggccccggttcttaaacactgagccaggtgttgctctgaaagtattttacagatataattaaatccttgatttgtccactttaataagatagtaccctgtacagtgggtgggactgagtgaatcagttgtaagaccttagaagccgcgctgaggtgcagagcttggcctgtgcccatgggtttccaccccacaccgtcttcctttctggactgcctgccctatgggtttagaacttgcttgggaagcccctacaacagaatgagcccatttcttgtcatcaatgtctccagatatatagatagataggtaaatagatagatagatatagatagatgatagatagacagaacaatagatagaaagataaatagatagatagatagatagatagatatcgagatatactcttctactagttctacttctcttgttgaaccctgactgataccaactcctaaatggttttatttacaagccgttgacggtccttcagatgatactttaacctgtattcattagatcccaaccaagcaatgctttaacatttcaaagcagaagcatcattaaatttgaatacctgacccatccgccgtctctgcctcctccttccttcttggaaaccaaaccaaggttatatgtacctttttacattatatatgtaaatatatatgtgcatatgtgtatatatatgtattttctttattgtgtattatgaaagaaactttcataaaataaaatgttgaggccagaaaaaaagataggttgaatctgggatgttgctagcaaaaaaaaaatcgtagttcttatttgaagtattcagtgagtatctgtatttgagtgtgcagcaacctgacatgggtccacctctgaggaactcaccatttcaggcagatagccttatttagactcccagtgccatttgtgagattacagtctagagactcctgaaaataaaaagcctttgacctacagtaggtggaggaatgatcacacatacacacacaaaaaaagcagaaatgaaatgattcaatacagggaatggagcagtggttagcatgtgtttgctggctattctcttttgaccaccagtggcttggagggaagggggcagacgataggtttcttgtggggcgaggtctctgctcaatcattggacaagggagcaagtccccgcagcgtggcttgaggggacatttggctaacacagcccctgactgggtctgcattcttacagctcactgtctgggtgactcagtgcttgctttttacccgccattctccagcctcctcacatttgagtctagcgggatctcatatttgagtccatcttaattcatcatttaacataggtctctgtgctccgaggtccccagggtacatctcagatgtggcatcttagttgtctggtttgaaacgtctaaaacgttttgccgactcgcatgagatattttgtgggaaaaggagttctgagtggaatacaccagtaggaagcctggattcctcattaaacctcccctcttagagcctcatggtgagtactgatatattaaagtcctgcaggggggacacttgctttgcttcgttcaacccgcttttcttggacgttttagcccaaggaacctctttgcaaaagaacacttgtaacacccagggagctactgtgccaatgaatatggtttaaggaagcctcatctacagaagagagacactccattgcgtgcagaaactgtaaatgaaaaagttagagcaaatgaaaacttcactccattttaaaacaattgaaaagtaagagggtgcatttgagctgaatttttaagatgaacaaaagtctaagataatgatattgattgatattggcatctctccatccttccttccctcctccactcaggaatgcgaatatgaaatagtccatcagtcgtgaagccctctcttaacttcagactctctcttgctttgcaatgctgactgctttctgtaataagtcccttagtgttagagggtgcccctttaactctgcttctgccaaattgagagccaactctagcacgtctgcacatctcaaatgcaaactgccaccctgtttattctgagaagctgtcagaaggacactgcttcttgactgtttggcattttaataggagggcctctgcaagccagtttgcatattgcaggggctctctgcccatcaggtgctcacaccctttggtgccagggaaggagatctctcctttctgattccaatctttccccaaagaacaattcttccccaatttgacgtataaaaggcagaaccaatttgcatctgccaaaacagcccagagatggtgtttcctgatctttcttcccttctataggatctactctttgttaagctctgaccctaatgtcattagaaagaaatgcttgccttctccccacccccagaacacaggaaaccttgcaatgccccagcatgagtgaaggcaagcaggaacatctccccagttgtctatgcctcagtgcctggctcctgaccctcactgactttcccaagttttcttgttggctggaaagagtaggtgttccagagtctatgaggcagggctgagctgttcccagaacaccaacatagaatccagcattttcccccattaggcacttagctctccaagcaagagtgctgcaatgagaggctgtggctttccagaaagtgaatcaggttctctcagctcctggaggaggttctgattctgcacatgcatataacccatagaaaataatcctctgagaaactcagcattttggaatccccaaatacctctctctacactgcatcatctctagcatggattgacgtaaccaaatgatggctaggaaccatcagggtttcctatcaagcagtgcaataatctacatcattagcaactgtaatgtggaagcacattaccctgcagaggtttcctgagcacctactacgtgtaagagactgtggtcagtgatgtggggacatcaagcactgttctcatcctcatagactttggaatatgactgaagaggcaagcctaaaaaatacacaacagtacaaaattataacaaatagtgtctaattaggggcttatttgcttgagtggaagtacaggagccatttgttgcttttgtgttttggggtgctgcttctcccccattccatttgattctccaggggatcatggatcagattgcctggctatcccaggctccagggatgcaggtgattcagctctggtcaattgagtgctccatccccagcaacaggggttggttcaaaatgagaccatgtgcccaagcagggccaatcaatcactgttgctggaattgatttgcaacctatgaaaactgtgagagaaggaagctctttctgctgggattgctgagctgatggttcctgaattctgtgcagagctgggcctcggggaagggtgctggggcaagggtcatgaaacgcagcaggtacttagtcctgcacagccctgagagccagaacctccttgaatttggcctgaggtgcctcactcacctctccctagtcctggccctgaccctatgcctcaaagccatatttccctgccacatggaggaaacctgttaggaaaaggagagaagaaaggtaacataccaagggtaaacagggtaaagacacagaaagaaacagagccccagtgacatcttgggagcttctagacccagccatgcctgcagcatgtacttccagtcatggagctgatatgttgagtttttgcattgctaaatacgtcttggttacaacagaaactggcaccttaatataaaatggacatttggctgaagtgacgtggcaaggagggccagtgggacccatgccccattctggggaggtggccggccgcgccatgctgtcttaaagcagcacatggacaaggacattgcaaacttggggagtcagaccttatgcctgtctagatgtgaggtccaagggctcagaggaaaacaggcaggttgttggagagttattattgaccttgtggaatgtttagtagcatcctaggacaaaagacacttagcctgcccatctgaaattagaacgggaacagaaaaagtctttatttattgattatttatcaagagacaaagctctggatccaactacacctgaagggagcttctgccttgctttctaagtcaggaaaaccaaccatgattgctaagaaattgccccttttcttgagccagttcaagatgggtaatgtccattgaaactaaaggacttctggtgaaggtaggattggaacccagcccctctctgaccacagtctaaagtataagctccttgggagcaggtgcctggagccctccactgtatgctcattgccagtgcagcctgacaccttgcaggcctggtccaacgtgaaaagcgaacaagggaatcagtgtgcagtggagaggcatctgggctccctttagaggagggaggggtcactttgctgggcacacctactaggcatacggccactgttacctcagaacagctagacaatgaggcaaggtgagaggtttctaggaaagaccacctggggccctgggccctggtgctgacaagccccaccctcagcagaaggcaaacacctccaccttcctgggcctccttcaaccttcctgccttgtccatgaaaggatctgagagttggggcgaggaggttgtattagtctgttcttgcatttgtataaagaaatatctcatgttatcttctagaatttttatagtctcaggccttagatttaagtatttgatccatcttgagttgattcttgtataaggtgagagatgaggatccagtttcattctcctacatgtgacttgccagttatcccaggatggctgtaagtatttgggtttatttctggattctctattctgttccactggtctatgtgcctactttttttttttttttttttttgatccagcaatcccactactgggtatctacccagaggaaaggaagtcattgtacaaaaaagatacttgctcatgcatgtttattgcagtgcaattctcaattgtaaaaatgtggaaccaatccaaatgcccatcaatcaaggagtggataaagaaattggtatatatacatacatacatacatacatacatatataaaatatataattagtatacatatataccatatataccatatataggtgtgtgtatatatatatacacacatacacgcacaccgtatataccatatattggtgtgtgtgtgtatatatgtgtgtgtgtgtatatatatacacacacatatatctataatggaatactactcagccataaaaaggaatgaattaatggcatttgcagcaacctggatgggattggagactattattctacgtgaagtaactcaagaatggaaaaccaaacatcatatgttctcactcataagtgggggctaagctatgaggatgcaaagacataagaatgacacaaaggactttggggactcaggggaaagggtgggaagggggtgacggataaaagattacagattgtgttcagtgaatactgctcaggagatgggtgcaccaaaatctcagaaatcatcactaaagaatttactcaagtaaccaaacaccacctgttccccaaaacctatggacattaaaaaaaaatttaaaaagaagaaacaggacaggcatggtggctcacacttgtaatcacagaactttggaaggccaaggcaggtggatcaccagaggtcaggagtttgagaccagcctggccaacatgatgaagccatgcctctactaaaaatacaaaaattagctgggcatggtggcacatgcctgtagtcccagctattcaggaggctgaagcatgagaatcgcttaaacctgggaggtagaggttgcagtgatctgagattgcaccactgaaatccagcctcggtgacagagtgagactccgtctcaaaaaaaaagaaaagaaagaaaagaaaagaaaggaaaggaaaggaaaggaaaggaaaggaaaaaagaaagaaggaaagaaagaaagaaagaagaaaaaatggaaaggaaggaaggaaggaaggaaggaaggaaggaaggaaggaaggaaagaaagaaaggaaagaaagaaaggaaagaaagaaagaaagaagaaagaaagaaagaaagaaagaaagaaagaaagaaagaaagaaagaaagaaagaaaaacctgagactaggtagtttataaggaaaggggttaaattggctcacagttctgcaggctgtagcgtaagcatgttgccagcacctgcttagcttctggggaggcctcagggagctacaatcatggcggaaggcaaggggggagcccgtgcatcacatggtgagagtagaggcaagtgagagtgtgaggggggaggtgccaaacccttttacacagccagctgttgtgagaactcactcactattgcaaagacagcaccaagccaagagggatcacctccataagccaatcacctccaccaggccccacctccaacactgattccaattcaacatgagattcagaggggacaacatccaaaccatgtcagagggtatgcagaacacacccaaggtgactctgaatgagtcacaacccagagaattccctcccccagcccctgcgactggcttctaaccaatggtatatgagaagtgcagggattttttggacataattaaggtcctagtttaattagttgatgatgattatcaaaacgagattatctcaggtgggcctgacccaatccagtcggggggcgccctgttaaagaggcctccatccttctctgatgtcagagatgtcaagcagagacatatcctcctgtggccctgaagaggcaaaccccacgtgctgtgaactacccgtggagagggctggcttgcaggagctgcaggcttggaggagaactccacccaccacctgagatggcagcccaggcagcaccttgactgtagccttgggagaccctgagtcaagggcacagcaaggccctgcctggacccgagaggagcagcaaccctgtggtaataaatgtgtgctgtcccgaatggctatgtttatgggaatttgtgaggcaacattaggaaacgggtgcagtggagtagggaggggagaggaacgggtaggtgaaggagataatcctctgtgatctaaaatgaagagtcttttgctgtgcaatgaaaaaatgaaaagaagaggctttgttctttgcctttccttcatttaagtgtggcaaataatctgcaaggagtccccgaacctgtgtagaaaatggggttgggagcacatcagagaatgagcttaccctgttgtggcctctcggaggaaagcaggctgggaaggaggaaggtctttcatgctgtctatatgagctgatttaatttctgttctgaatatccatgagctcatttacacatgtgcattcagccacatttctctgactcgaatttattaaacatttctgttcgtgccctttgttcccaagatttcctcttgcctctgttttcccacttagctctccgggaaacctcaacctcgctataacataatgtcctcagctatcttaagaactgtgtcattaaatagcagagtggatgaaatgttctaattcccttactcaattatattaaattatacattcccacaaaaatctctcccatcactgcattatttaagtagaaagagctaaataaagaagacctctatttttcattcctaattctcagataattataaatatactgactttttaaaaaaatcatggattaactttcatggagttggttgatttcctttttatggagacttgattttgacagaagccctaaacttgtaataaagataatgctgaaggtaccacccattgtgttcacgagaacacctcacctgggcatttctatagcaactatcattacagagcaacaggccaaggcagaacgcactgaagaacactttttctttggttttgtttgtttgtttgtttgttttcttgaactcagctgttttttgtgacccaagcaatgtttctgaatccaggctgtgccctttgtggaaaatgtgttcattattttatgcagggatttgcaaatgctcacaaactgaattttagcaagttgagctctggtttccccatttacttacattttattttcccaaatgggttttccgtgggtgttgaatgaatatttgatggttccttgctctacttcctgtccttcagagtttttctaactcattgtaataaaccaacaaaaaggagagctaactattcaaagaaactaatcaatcaacattgatctaaaacccaggttcatttaaataatgcaaatcatcagaccatatcatttttaatattgggaaaatgcagtacagcatgtaagagcatggactccagagacaaatgtccagggtttgaatcctaacattttcatttactagctctgtgacctgggccaagtgacttaactactctgtgcctcagtttcctcatcttcaagcagaataataatagtatccagtgtacagggttattatgagggttaaatgagttaatgtacttaaagcacttagagtggtgctgagcccagcataaacgttgtatgcatttgctgttattattgttgccattatgtttatttttataagatagattttgtggaaatggacaccgcaagtgatttgctgattttatttattcactcccttgctcatttattcattcaccccacaagcattacttctatgttctcaggatagggccagatgctgttgcgttaagatgtaaattttctgtagcatttttctcataaatggaaaagagcttaggttcccctgtccaggttgagctgacttattcttgccaacactgagtcttttccagtgtgttttctacaagtgaatacagaccataattgtttttcatgggctctagatgcatctgccgagaaaatgtcacacaaatgaggtcagtgggaaaaaataagccggatataccgtgtaggcgttccgttgagcatctgacgttttcctattcactcaactttcttgttacttgagaatctttgcaagtcctgggttttgtgcaatagaaatataggaacaacagattcaggattttattattctcttctgcaagtttatttaagaacattctgagcatgggtaggttttcagtgggcaatatctagctcacagagggaatacctgcattttcatctcatagattgtgctaaatctattttagtggggcagggatttaggacgcaactgctgtggtcatacaggttaccacaaatgcatccctaagaaaacattaaagcaagaaaaagatgtaaccagccttctattcagacagcatcattaatttctatcacactacactgccttcagccaaacattcattcttctttttacttattgcagcaattcttccatttgagaaaataagattagctatgctacacccacttggtgaagataatcaaattacatgttttctttcttcttcaaatttaatcagtggcaacatctgtctccccaagatgagacaaactagctcaatgccaccctttaagccaaggtgtcctctccagttcgcgaaggatctgagaaccccaattcatcaccccatccacccatccagatagaatgcccataaacatcagcacagtcacattcagtggacacaaatggaatggtaagacagcaaaacttttaaagaaatcatttttttaggcatttggataacatctttccattgggatacaaaattttaattaaaaacaaaaacaaacatctatcaaagcactcagactttactcattctaagcttgaggtcattgatccaaggcagcgcttctccactgggggcatcgactgggtggagggcagatatggtgctaggccactgagcccaggacagcccacaacaaggaagtgtctgcccaaaatgtcactaagtcccaaggctgagaaatcctattacaacggttgatgtggggatacagcatggtaagcaagttacttttttcgtcttgctctatcacccaggctgaagtgcagtgacgttctgctcactgcaatttctgcctcgtgggttcgagagattctcctgcctcagcctcctgagtaactggattataggcagctgccaccacgctcagctaatttttatatttttagtagagacagggttccaccatgttggccagactggtctcaaacttctgatctcaagtgatctgcctgtctccacctcccaaagtgctgggattacaggcatgagccatctcgcctgggctaacaggttacttttctaggacatttaaaacaataacttgctaagctaagtcataatgtagatataccttaaagaggaatattttaatgcagtgtcaagctgtaagttcttgagttaccacccatctgactaaaattattaaggtttttttaagccacaaagctaccctaaaatgtcacttttttgtgtcatacttgtaattaccattgttgtaaatataaaacaatgtttattgagcagatattaccttctatccaatgaggacaccagcttcatcgtagttctggtagcaaaagagcgaatgcataggtgcttggttcagtaaatgtccaggctacgcaccgtgcaggcagatggtgcctggccagtaaggggcagttgatatcaggcactgctgctccaaagttgctcacttctcagcttagaaatgtgcatataagaaagttcagggactcactgaggtcatccagctagttagctcaaaaactgaatctagacggcagttcttaccttcttatctccattccacagagaaaattctccctcaaattagcagaattagcatgatcccgtcttcacagaggcagaggcagagtccattttgccccacctaagggttctcactcacccggctgtgagtttgtgactcaagctttcctgagcctgtggaccttgttccttttaaataattgaaatctcatagcaagagatgcatatttcttcctcatctcttcaggggccacaaagttaaatcccaagagagcaggaaggtggggaggcagagaatgtaaaggaacgcttagagttagcagtcttcacagcacaaccccatcacaccacggggtcggggctggtatctcccttacaaaaaagaaagctcgggcacagagacattaagtgactgacccaggtcttctaaccctttagtggagaaactggggtttgtcccagactgagagcatagcccaaagcctcagctgcgggtcagtgctgcttaggagccagggcactggattgaaagttcaacacctcaacgctcactaggctgtgtgatgttggaagggcagtttatgtctctgagcctgagttttctcatctgtaatttgacgatagcaataaggtgaggattaaatctggcatttggaatatggtgctaaggccagtgccaagcacatagtaagtacattgggaaggtgaaaaggtgggcccctgtcaccatgcctactggcccaggtgcttaatgaagtttgccatatggaggctccatgtgcagaagatgaaaaaccagcccagtatgcaatccaactgttcattgaaatgagtagagcttaacacaattgagccatgcggtctgtttcaccttgaactccgggttagctagagcaatctaggatacctgttctgtctcacttctctgtaaatgttaccccacttccatgagattgtacaaacaggccctaaattgcctgctctaatacatttatgtagttttcccatggatggtgttaaacaacgcagcctctatttcacacttgaagtacaattcttcagccttttagctccaccacagttgtgaaaattggggcatgttatctggctacccatagaaagagccagaacatctcttctccacgcgtggtgaatttctgtctaatgtaaaagcagggtgacccgcagtagcctaatttctttaatcattctaattaacaagtgtatagggttttatctaaatacaccagaaaaaaaaatgcagtaatgacagatacagtaggcaattaacaatacgaggtctagaaagctgatggaaaagctttgagctcctttgttatttctcctttcttaaaatagaccctggccatattacaatacccaaaaaagagaagaaaatatctaagcaaaggccaaactgagttgccatgtgcatcccattctctttgaggattcttgtcaattttccactctggaatttatggcacttcattcccacaaattagacgacaactgttagactcagtatcaaggttttgctgatgattttaccccgctcctccaaaataggagttcaccaagaaaacacatagaattaaggccaaacatgcattccacatcttcatggctgatgaaggtgtgaaccccgaaaatctgagacaggtctcagtttatttagaaagtttagtttgccaagcttaaagatgcgcgcctgtggcagagcctcggaagctcctgatgacatgtgcccaaggtggtcggagcacattttggtttggtctggatctggaaaggggagacaactcgaagagggacagggcttccagagcataggtagataagggacaaatggctgcattcttttaagtttctgacgagcctctccaaaggaggcagtcagatatgcatttatctcagtgagcagaggggtgactttgaatagaatgggaggcaggtttgccctaagcatttcccagtttgatttttccctttagcttagtgatttgggggcctaagatattttccattcacaaaggaagcaccaaatctccgttgactctgccagtgagtgacagcctcagcaccactgtctacagccaccaggcgtggcctcagcatggggactcattaattctagctttgctcaccaaaaagaaaggatgtgctattgtggtttcaggagcactgcagtcacatctgcatcaaaagaccctggaagatagcacccaccttccaatcccaagtctctggaattcgacttttctcatctaatttttaaaaagcatatagtgatttttttaaactagcagaagaaaataaaggaaactgagtagggatttacaatacattacttgtcaggattgagagacgaatgaccagagaggttgctgtgccaggaacactttcaggctgtgggtctcaggagggtccttggcttctaggaacctgtaatttgactgaggcaggacattgaattaaaaacaccatgagatgaggcagaagctcctttttagcctggcactgtgcagctccccttccaacctcccacagcttgatggctctctgacatcccgtaggaatatctctctagaagccagaggacatataggagaattgatgagtgtgtagatgaggagtcaggccacctgtttttgactcctgacttaaagccattgacttcaccagtctctacctgaactcttgcatggatgaaaggaagagaagaagaacatctctgtgagtttaatctgaacaagagatgagatggtgtttgttgggtatttggcacatggtgagcaaatgtccatttcagtttgtgttattataagcaaaacaaccttgaactcttcctttgtaaaagctatctttaagaaaatagtcaaatactaaaactattgataaaaatgaggcaaaagtgaagtcgtccaaaaatgagatgtttttggaaaatttcagactttacaaattcacagtataataaagccaaggtctgttgtattatcattcctgataatttagtggaataacatggcaataagtaaaaaggcatttagagctcaaaagcaatgcagcactttatttctgtaatgataagtgttatttgtataaattctttgtttcccagggaaaagccaccatagaaattgaagtgtcatgtgtcatagagtcagacaggcgtcatgacagccattcacaatcgtggaaccttgagccgggcggttaacctgtgtaagccttggtttcttcatctgtaaaatgagggtaatgctatccactcttcagagccattgccagaaatatatgaatgaatgactccaaaatgtctcccatatttgcctcttcaaccgacgtttaattccctctttgctaacagggaaaatgtccctttactgcttaagggagagagaataaaggcggaagcaccaggttaagaaattctgatgttttcacgcattagctggtgctcctagctttctgatttccattttctagataaggctttaaggataaatttttccttaaaataataaacattcattctcatcatatttggttcttttttgtcagtttttgtttactatttaaaatattaattctagctttgctcaccaaaaggaaaagatgtgctattgtggtttcagtaataaaataataactaccttctctcactttgaattcttgcactgtacgctttccttatttttacatgaatgatggaaccattcacagagtttgattacaacagtgggcaggttagtgagcaattcttcttttctctgatttcaattgctttgaagtagcaataggtgaattgaggagaaagaataagaaaaaacaaatatgggtaaataaaggtagaatataagtgttcaagagagaatacaggttatttatattgtgcccttttatctgaatacactacaagaaaaaaaaagttctgcacttaaaaaaatggatttgaaggctcaatacctgtggctaaatagaaagtatatgaaatattataaactaaaaataatgtcttcaatgtgtatgccatttccagtgtgtacaatgcttttatacgtgccagcctatttttcttctaaatggttctgtctgctcagtgtcattcactccctcattgatgaaaattctgacacttgcaggtaaaatagctttctccatagccaggtagcagtgctggcaagaacctagatgttttcaccccaaccctatgtcttctccaagaaccacagctgctttccaaacaccaggatggtcattctcactctccagggttttaagatgtgcctgatgtctggtgccctgtcttggaggaacatgtaaaagggagaaggcatgtccctgtgatctgctatttcttattccagagttccacaaccttgacactactgatacctggcagatagtgggctgaataattctttgttgtgaggagctggtctctgcactgtgggatttttagcaacaatcctggtctccacccaatagatgccattaacaccttcacccagttgtgacaaccaaaagtgtctctagacatcaccacatgtcccatatgttacagaactgtcctagctgacaaccattgccttatcctgctcagaatattacttataattacacgttatcactttttactgtttaattacttgttttatgttttgatgaaaaattaagaactttcttgcaatttaagtcatctctccaagttttgagagaaaagaaaatacaaaacttttgcaaacctggcataccaagagtaaataacaattatgccatatgggtttatgtctgggtacagaatttttacaaatatatttcagattcaaattgttcaaaaatatctgtctaatgatatgtagtttcagagtaaacacttcatttttcttctaaatgagcattcagtttgtagaaatggagaactaatgtattttctgctgccaaaaacaatctccatggtattcagagacccttgttgattactttttagctacataatgtttacattattcaaaccaaaaataccaaaatgatgggtgtatggatcatcttggatttgctttcttatctggctttcaaatccagtttcctgtgtaatcacaacataaaaggagagataacttgataaaatggagaattgattgtaggtagcttgcctcagtaacccaattcctactgaaaggagcaaagaaatgaaaaactgggggaaatgacagtagcattaaaaaggaaagtatctcttcatggcacaaaatagaggactttctgctggatgacgtgcatgtgagaccgccttcgaggaagacagggaggggccagactgcagccaaggaactagagaaggccggataggccaaggggaatggaacgaagagaccccatgtgtgacagcagcaatctgggagggagtttctgcaggagccgcggatagtccacctgggccgtctgggtggtcagcccccaaatgcaaaggaaggaagagcagggctgtcacttgactcttggtggcagctccaaaaaggcaatggtgcctgctcaccaaccaggaatgaagaccttccaatcaaaaaacaagacaagaaaagctgcccctgatgaatcattttcaggaaacacagagaagtcattacacacccagaagattttcccactggggcccctctcagcctcgtgaatcgctctggcatgtgatcaagagaaagaattccaacaaaatccaggatgacactaaaacaatgtgaagaaattcaggtatcaacactgtttgggggaaaatatcctagattgaaagagaccacctcttacttaatgatgtctaaatttaaacagtgacccacgccggagttcttgacatggctctcaacaccgttatggaaattgcagttcatgcaacgactgattgattggttgattgatttgcctatctggaaagccaagaaagtcagctgaaaacagaagagaagcaagaaagatctctaagatggggatatttacaaataacatttaaaacacaatagccatttaatatcaactgcatgccaggcaccgtgctaaatatgttttttaatctcttttaattaaattctacttcttgctagctgtgtaaacttacacaatttatttaacctctctgggtcagtacatcatcgattcttttgtatttgttgacactcgctgtgcagcttagaatacactgagtgtattttcaagccatccgtcttgaaaagtgtgtatatgctccacctgttactgtcagcaacccacgacctccaccaaattgtgatgggcacattgccataaattgtattgttatccatactcatgtgttgtaatcacattaactgatcattttttgcattgtgtgttactttcgttagtactgcagatttgtcattttgtttctgtcaatatttggtttacttattatgaagcgatgttatttggtgaatacaaattcaggattttttatattcatggtgaattttctcctttcccatgatgtaacaaaactcttcatcctaacaatccctttaccctaaagccctctgtgtgttgttcacatggctacctcagttttcttttgctttgtatggtattatacatctttttaaatcctttaactttcagtctttttttttaccttatatgttaaatttctttcttgtaaatagcatattgttggatgtctcaaaatgcaaactgaaaattcctcacttttaaccgaacaataaaatttatttttgctgattatgatttttaaaatatttgaatttgtttgcacaatgttaatgtcttaatgattcttcttcttcctatgtcatagtaaattgaggagtcttcatttcttttatctttttctgttttttcttttttttacccttacatcagatttggatgttttgccttctatttctatccctttattgggaactcttaaaaatttaatgctaggtatttaactttcaaagtctaaaattaataaatatttatattcttttttcaaagaacatgtagactttagaactctttaactctgatcattcactcttaaatctcccttgttcttgctatgtggtatttagtttccaccttctttgtaagccacccacattaggcagtttctcaggatgcacctcaggagatgaaaaataagaagtagaaattatgagaccaggaaggtaaaatgagaaggttcaaaaatacataataagactttaggcatgacaaaaaagagaatgaagaaaaagcagccatcagaaagataatcttcaaaaatttccagaactgaaaaacaagagtctatacatttttgaagcacaataagcctcgtacaacgtaaataatatcagtcccaattaatctgattgtaaagaaacagtgggatcccaaagataacaaggaaatctcaaaagcagtcataagaaaaataggttacttaaaaaaataacaattaattgccagaggttgtttttaatcaagcacaagagaagctagaagagaataaaaacttcagattgctaaacaataaacatttatcaatctatacccagataaactattaatcaagataagggtaaataaagaaactttcagatataaagaaattaagagttttacatttacagattatcatcaaaagaatgaccaaaagattagatttttcagcataatctgtgtattactatgattacaaattaaatctgaggtctcgatggattaaataaaaacccacaaaggtttcttttcttgccctgattgcactggccaggacagaaccaacacgctttatttttctgctcacataaagtctactgtaggttgagcaactctctcagttcacagaaaaggaactcaaatacattaatactcaaatgagtaatttctgaatatagaccctgaagagcatcatacacatgcacaagaagatggtgtacatatatttattgttgcatttctaaataatacgaacacattgaaagcaatttttaaaaagcctataaattaagaaatggatacaaattggggcataccatgaaataccacagagcaggagttgacatactccatatggcttataagatctgaaatatttactgtccagttcttctagagaaagtttgccaacccctgggataaagcacttaaagtgtatcagtgtagatatatctaaaaacatataaaattatcatttagcctagaagaaaatgtgaaattcaaaaggatatgtacaactcgagacactgtgttttatttaaatatgaagcacacaaaacagtgacatgcatacatgtacctgtatattaaaaaaagacagaatcctaaagaggaaagctctgtataaacgtcagagccctggctacctccacagagggcagggaaaggaatgagtaggggagaggtgggaatggcagcaatatattcatcaacactggttgctcttcaaagtctaagtgttaacatttgttaaaattctgtgttttggccaggcgtggtgactcacacctgtaatcctagcactttgggaggctgagacaggtggatcacctgaagtcgggagttcgagaccagcctgaccaacatggagaaaccccgtttctcctttaagttctgggatacatgtgcagaatgtgtaggtttgttacataggtatacatgtgccatggtggtttgctgtacttatcaacctgtcatctaggttttaagccccgcatgcattaggtatttgtcctaatgctctccctccccttacccctcagccgccaacaggccccggtgtgtgatgttcccctccctgtgtccatgtgttctcattgttcaactcccacttacgagtgagaacgtgcggcgtttggtttcctgttcctgtgttagtttgctgaggatgatggcttccagcttcattcacacattgatttttaaaggagcaaacttttcacacatgaatgatgtcttaagacggcacctcttcacgtcaaggatgtgggactatgaccccttcagtgtcccatgcattccattgtggactgtattatctgtctccttgtgttctcattccccaaccactgctgccgccactcataagccagatgataagccctctgcaggcaggatccatgtctttctccacctttgaatccttggtgcctgtcactgtacccaggactacctggctatttatcacatcattgctgcaataaatgcctgactctatgttctccgtgttaggcttaaaatattgatttttaaaatgtcagttgtacagaaaaaaaaaagtactccaacaatctggtgctttccatccccaaagtttagaactctggtgaactctcaaaggagacagacttgagtagaagaatagaaataagatcttcatttcccaatacgggagcacatgttggagacattttaacgtcaaacaggtcaatcaggatataattgcctctgagagacactcaagaaatcagagacattctttacctggagctgagtgccacttgaaaagatgacagcctttcacgcgtttgaaaacatcaaagactatcaaagcaccagctccaaacctgatcctcacaatccaacaccagcctacgagtcaggaatgaaggcagcagcaacaggagaaaaaccacattgcatacgtaaatctaagtcacaggaaacacaaatcccagagacaacctcagttatgtggccctctagttggactcagaatggttctgaccaacactgggttcagtgtggccgaatttacatggagggtgggtttgcagcagaggatgccatctctgtgggctttcagaggcattgaagaaggagatccttttccctccctggggttccaagaaaacactctcttgggttgactttacattttacaagtaaatgcaaataatacctggaagagataacactcttttttcagatcaaacattaacacttaatttgaattaactttagcagttgaggagcattgagaccattatgaaataatgctatttctctggttaaagctggttcttacttccaatgacatgttttggaacacgctcgtcgatggacaaacacatgtgtccttccttcgagattaaacagtttgagttagtcttaagtttgtcttctccattgttgtttggcaagaaaacttgctacctcctttcagaaaacaatgtgtcaatgcatttttaattaaagtcttattttgagataattatagattcacgtatttataagaaataatgcaaaaagatcctacatactctacccagtttcccccaattataatatcttacaaaactatggtacaaactcacaatgaggatattggcattagtacagtcaagacacagaacattttcatcaatacaagaatcctttattctgtcctcttatagccacacccacgtcctcccacaagcctcatccgtgtgaccacaattctgttctccatctccaaatgttatcactttaagaatgttatgtaaatggaaatacagtatgccatcttttgagactggcttttttcacacaacagaattccctttagattcccctctcaattcttgttcctatcaattgcttgttccttttgattgctgagtaatattccacaagatggattacactgcagtttgtttaaactttcatctcctgaaggagatctaggttgtttacactttttggctattacaaatgaagctgttatgaacattcatgtacaggattttatgtaaacctgggataaatgtccaagagtacaattgctgtgttgtatggtagctgcatgttcacttttataagaaattgctgaactatttttcaaagtggctgtaccattttacatctccacatgcagtatatgagtgtgtcaatgtattttatgaaatatgtaaacccttatgccccttaactaataattaccctttagggaatctatcctctaaggatagctcaacatatagaaacatatatgtgtgtgtgtctgtgtgtgctttatatagcctattttttgactttaaggaaagctaaagggtaagctagatgggattttatatttaagcctagaagaaaaacatgttaaaattgtatttatggaaaaatataatcaagtggaaaaacacattgccctatgtttctcaggcaacagtgcttctaatatgcctatttgttttgaacatatggttatatccttcacaccactgtacacacttgctctccagggagaaaaataggtctagagcattggcttaaccaacagaaggttaaccagcagaaccttaaccaacagaaggttaaccaacagaaccttaaccaacagaaggttaattagctggtgaggagtaggaaaccattagggcctgcacaattccttagactggtagatggtggttgagggtcaccgagaggctcttgcatgtgttgtcaggagaatgtcagaggtcagcacgaggcataggaggtgaccacagtgagagaaaagggggcttggaggagcctccagtccacttcacagttgatgggcaccctagccatggttgagaattagcagctccctgttcctcaaggcaaaacccaaaccaaaacaaaacctttcccagaaattacatttttcaaagactatttgaaataataccacatagacagatagattttttttaagagaaaacagtaacctatctagctagcatcaaggggaaaagatcttaataacgttgcctgtatcttcagagtctttggagtttgctgctgttatgttttcaagaaacccaatatacaaagagatcagagcaagtgaacacttgggtcttgcatgatgtgtctggagaactggcctgcagaagtgtcaatcaaatcttaacacagaatttagttcatttctaaaagattacaaatatgaattgacttctcaattaaatctgttaaccatagaaaataataataaaaaaaacacagcacttcagtttaatttaattttgactgccttttcaaatgccagccatgctggtggcgggagagacagaggcgcctccagagaccattgggtgtgagtcctcagaatctgtggatatctggaaccttgtggtcttgtcacagagagggaaggagacatgaaagcaacttaaacccttgggaaccattcctgaatttatgaaaccctcttaaacttagttaacatctcctctccaggtggagaaggaaaagcttcggggtcatattttgaaattcactggacctggattcaaattctgtttctgttacagaccgtgtggccttgggaactcatgaacaattcttttttttttttttttttttttttagagatggagttttactcttgtcacccaagctggagtgcaatggcacaatatcatctcactgcaacttccgcctcccagattcaagcaattctcctgcctcagcctcccaagtagctgggattacaggcatgcaccaccacgcctggttaattttgtatttttagtagaggcagggtttcaccatattggtcaggctggtctcaaactcctgacttcaggtgatccacccacctcggaatgtcaaagtgctgggattacaggtgtgagccaccgagcccagcctccacgagcaattcttgagcaagtcactcaatcctgttgagccttaaacactcccctgggaatgaggactctcatccccgcttgcaaggccgtgtaggcatgacgtaaacttctgaatgtggatcattagctgcaggtccacatagatgacatactggctgctgccgggtggctggtgagatatgagggactatttccctgtcacggctgagattcgcccattgtcggtgagttcatgaggatgccgttttctttgatgcgttcactgattctgcaagtatttgttgacacaggcacagttctaggcgctgtggagagagcagggagtgaaagggcacctggctggtgaggagggcaccctctgttacagggagagatggtaaacaattccttatgcccagtaggtgggatggacactggggagaaagctagagggttgttcagggatagagagcaaacctgagggtggagaaggaggccctgttaatagtttgtcaggataggcctctgtgataaggagatatttaagcacagccctgaaaatgcacggtgacgaggggacacgggagactattatgggattggccaaacacacttttaaaaatattttctggcatcagcttctgcttgtttctgctaatgaactgggatccagaagccggatctgctctgcctcgggagtgctctgtggctttcctgtttgctgctgggaggcctcagctgccacagcagtgtgctcggatcctgcagcccttgggtttgctgttgggaggcctcagccgccacagcagtgcacttggatcctgcctgcagccctcgagggacttcctcctgggggctgccctccactccccatccatcttcactccctccggctcccggacctctctgtacctgatctcttgtgcttgtctacctgcccatctcctccaacttgggtctagacctccagggtgggaacgtgaccttacccatctttgtttcctctggtatctggcttggtgtttatttcacagtagatccttcctcagcacaagttaggtgagttgctgagggaaaaagaaaagaaaaaactaagtaggtttgccattaaagcagcaaaaacaacaacaatttatactgactagcccttctgcaataacagaggttttttcctatttagacaagacagaaacccaccctaattagttcgagaaaatggggggaaaggtggcctatagaaagtgagaatcaggcccatagggtgctgccactggaaagtcagggatttctacttgtccccctccctgctggtcccaggtcccgcctcctagtcatcatttccttcccctataattcccagcgtgtgggtaccattggctggtccgggcagtgcctcgagtcctgatgaagttttgtgaccacctggcttcttcaggtctccttgatctcacgtttccaacgttccatcccggagacagatctcaatgggctcaggctggtctggggtctgcctctgtgcccagtagctacagaccctggaggggacatgttctgtgcacagatcttcctcacaagctccctgtgatgatttctctgcctgctcattagtaagctccgcagtgcctcctgcagagctgtgcccacagtgccactgagggtctaaagtcaagttggggctcaataactacttggaaaatattgactgaacgctgaaggtgagagcagggcaatggttagaacgccttccacacccatgaaaaatgtacaataaatgtgaaatatttaaaataaataaatgtgtttctgtttccttatcagggcctggttttgcacttagctgcctccatccatggttcttctttccctgccgtactttcatgaggtgattaaccccaatcaggtatccccgcttttgaatcacaggactaaaaaataattattttgctgaacattctaagtgaagaacagtgtttgtgatttccataccctgagatggacacattgctgtgtgtgtccattttctgagcctacttttcttctctagacaatggagatggtaataataataacagtagaagtagtagtagtcctcttggtatactccatatcgttgttgtgagaattaaagaaaataatgtgagcaaagtgaccagtgactagcatggtacaaaaagaaaaaaaaatcagccctaaatggatgttcgctacatcttttgcaaataccacccccgcccctgctgtactgtcatcattgtcaggagcatcaccaggggaccagcccctgcatcaccctctcaccccccaccctctcaccaggtgtctcctaaaggcagctgcagaaaaatcgcttgttgttttctaatgtggacaaaaagattctacaagctctgtttctattatttgagggtaaatgtgagaaaacgacaagcaaaaaaaaaaaaatcacttggaaaaaagtttgatttatgtctgcaatcatacacagtcaacttttaaactatattcattagcttgtggaatctcttgtattcctcggcacgtaagacacagttcagaaccctgcaaagacttcagctcaccttggagatgaaatgtgaagcatgatcaagatgaaagacagtttgcaagaagcatggacacagaaattgtttgcaatttagccattcttcattttgtgtgattggaagtgctagcccacttacaaatgacaatagaataaagagttttaaacaagcattttctagaatgttgatttcctggaggaggaaaaaaaattgttgtatcctgccaaaagattgcagcacctataaaatggtaaggtcatttttctgctgaaatgtcacagtgagattttttaaatagattcctggtgcagttttaataatgtcgaggttaaagataaggggaaaaaagtatttaacaatgagagtgaagcaaaaatattgccgtttaaagtggattttaggcgtagccttttacgatgtcagggcaaaatataaccttgtatactgctaatagttttctaattgttttattcataattaataacaatcagctcaaccacactgggctgatgaacctgctttgaccctcatgctaaatatcataaaagcaatccccggggaggtctggaggagggaaaaggaacagggaatgcatgaagccctgtgagtttctcaaaataaaaatcgaagagttggccgggtgcggtggctcatgcctgtaatcccagcactttgggaggttgaggcgggtggatcaccggaggtcaggagttcaagaccagcctggccaacatggtgcaacccccatctctactaaaaattaaaaaatcagccaggcgtggtggcaggcacctgtagtcccagctactcgggaggctgaggcagaagaatcgcttgaaactgggaggcagaggtcgcagtgagccaagatcgggccattgcactctagaaataaaaaaaaaaaatcgcagtctgttctgcagtggaccttgtggagagtgtccatctagctctcttctcttgagctgaaccccatgactcaaagctgctggtggccaaggttgtgtcacgtgacacgactgcatccattgttggagatcagtgtcggaaatgtggaccaagctgggtcaggtcctttgtccctagaatttgtgctgaggaaaggaacctgggagatgggggttgagggtatttttggcagcatgtccacttgctcctcagtgggagacttttgttctatgttcatctcggtaagtctctagtaaattgcctgttttaacttaattgaatgtattaatgaagatggtttttcataacaatcactagagagattatttctcctacttaggttgtaaggaaggagggagccagggcgagttggggaactctgcactctctgtaaatctcttcttctctcttttacattacacaagagtttatgtggatgagaatagagaagttcagcagccatttatccagcctgggaggctggagaaaagtttcttctttgcctgcatcttctctcttcctgcctttcctagaagtacccagacattttcacccttggccagttctgaatccacaagctacctctagctacaaggaaaactgggaagacattcttttttccttagtgagaggaataggaggacagggagctggtatgactgtgggatcagcggcctatagggtctgccccgctggcctgtgtggctttcagttgatgacccaagggtccaactatgacaattatggtcaagagactaggaccctccagattctaagttcacattctcacatctaccctactgaagcctacaagaaggaggaaggtgtgattcagcctcaaatccgccttctctgagacgacgcatgggcagctttaagtgctgtctaagatgccacatgactacacgtgtccaccaaatacaccagttctttgctatctttgcttcagtattttttttcctatttggagatgtccttccatactccctgtctttctctccccctctccctccctctttctctcgccagagggcaggctgtcatgatggggagtaccatgtccatgcttggtttttgaatatattcttttacatgtaagtgttcatagcaatatacagcatatttcatatcattctcaaagattacatgaatgatatcatattgctcacatgatccaggaactttctcttttttccacatggcattaacctctgagatccatccatgttggtatgtgtagcttcagcttatctctcttagccactgtgttctcttctaccccgtggctcaatctttattgagcaatattgcccaggcgggtctcaaactcctcataattacaagccattgtaattatttataattacatcctatgactataagccaattaagaaagtgatcaaaggaaaattaaaacctttctatgaaaaattaaatctcgttgaaatctcagctgtagtagctaagtatgccagcatgtactttggtgagataaggatgccagtcttgtatcttcctactcatggactattagactgtttccactttatggtcattgcaaacaatgcaggaagggacttttgtctttttaggtttagaagcaagcactgtcatctaactatttgtctaggagttgaatttatggaacaaaaggtatccatgtaccagcatcttttaccagattttgccaaattgttctctacttccaattgcagtcctgccagcctatagatgttccattttccacatcttcagccattcttcccataaaacacaaatgtttttgctattctaatggataatgagaaagggtctatctttgtgattttgatttgcgctttcttaattactggcaagtttgagcatcttgttctgttgaatgctcacctgggctcctgttctctgaattgtccatccacagctcttgtttagagcagaaccttgctctataagtgctccatactcatccttcatcagttatgtgtgtcgtccatgtgtggtctcagtttctagctgtctttggctttaaggtatctcgtattttacagttgttttaaatttaaatgtggtacatctatcagttgtttccattgtggtttgtacctttgagtctatttcaagacatttttctctattcagaatcataaaatagtcttttataatctattctaagagttttattgtttcacctttttgcattgaagtctgtagtcaactttggatttacttttgcatatgaagaaaagcatatggggcatataatttacttctacgtgtgaaagaaaagtatctgatgatgcatatttcaaataggcaggcaggtatagtaacaacattggcagaatgtcctatcacttctcagcttttgtacagggcacttcggtggcccgtgtgtggggtctttctgggctccccatttttttttgcaggaacctgttttttaaatccctgatttaattcccatgggtttttattttcaatatagtgaataataagcagggcattttgctttgatgttgcttgtaaatcattttatcatgttaataaagttccttttattccgattttgctagaagggttttaaaatgattatatttatttggatgtttaatttagtaacataattttgtgtatgttgacatgactattctttaagttactagtgtgttgaattacattaatagatttcttaatatcaaaataagaaataagtgaacaatgcctgtcttatgatttaattgtttgtgtgtgtgtgcgcacatgtgtgggaacattcagcttgctgatatttaatttaggtttctggatctatgttcaaaagtgagagaatgtatctctggtcaatgctatgaataattccatccttttactttcaattctttttctttctttcttttttttttttttccagaaagaggaagtctcactctgttgcccaagctagtctcaaactcctggcctcaagagatcctccctctgctgccaaattcttttgtgatatgaagttgatttttctggagtagggaggttatctaatctgggaatatttgtgttttaaaaacagttatgggaccaggagcggtggttcacacctgtaatcccagcactttaggaggctgaggtgggcagatcacttgagctcaggagtttgagaccagcctggccaacatggtgaaaccctgtttctagtaaaaaataaaaaaaattagctgggtgtggtggccagcatctgtaatcccagttattcgggaggctgaagcaggagaatcacttgaatccaggaggcggaggttgcagtgggccaagatcacgccattgcactccagcctgggtgacaagagccaaactctgtctcaaaataaataaataaataaataaataaataaataaataaacaaacaaacaaataaaaacagttatggtatttaagtaacaatgcagtgatcctttcctgggactgacttcgaccctcttagttttgttgctggtttgactcatcaggagcaactagcactgtttcttgctgagctgagatgaaccattcagggtggtgcccactgcacccccaatggacaggcttcaccagtaagcagaagcaagtctgcaccccgtgccagttctgctaagaatgttcttatatattttggcaaatgttcagcaaacactagaactaacaagcagcttaaagtgagacagctgtccttcttgaagctcaagattaaacgtacacagtccaagtcaagcagacagtaaatatatttcagaatcagagcttcaggaaggaaggattttcaaatactgtacaatggaaaaaaagaaatcactgatgaaacctattaaaatatccttagaaaacacaggtaaaatgtagtcaaaagatccaaaagaaaagatggtctcagcaactcttgtctcaacattggatagccttgcagagatgataaaacttcttagtgatgccttagccttgatcatatggcaaagggaagcttatcatggcaatattttgcaaataatgccttaactctatttaaagtacaattctaggatatacacaagagacacaataatgttagttatgcaggaagaagctcagagtcagaataatttgcataaaaggtatggctctaaaatactaattctgatgcgtctaatataaattaaaaaatggttccaaggataatccaaaagtgatttggaatcattggagaacattccaacattactaatttatacgtgcattttggcagcatctttaaaaagaaaaacttattccatttatttataagtacatcctatgactacaagccaattgagaaagtgatcaaaggagaattataacatttctaggaaaaattaaatctcattgaaatgttagatgtagtccctaactattccagcctgtactttggtgtaataaggacaccgatcttgtcttgggccctgtagttggttgaatatgtccaccttataacccttggaatctgtgaattacgccttatttggaaaaggggtccttgaggatataattaagataagagtcgtgaaatgagatcccactgggttatctgagtggacattttcactcgtgtccgtgtaaagagaccaccaaacaggctttgtgtgagcaacaaggctgtttctttcatctgggtgcaggcgggctgagtccaaaaagagagtcagcgaagggagataggggtagggctgttttataggatttgggtaggtaaaggaaaattacagtgaaagggggttgttctctggcaggcaggggcaggagacacaaggtgctcagtgggggagctttttagccagaatgagtgaggagaaggaatttcacaaggtaatgtcatcagttaaggcaggaacaggccattttcacttcttttgtgattcttcagttacttcaggccatctggatgtatacacgcaggtcacaggggatatgatggcttagcttgggctcagaggcctgacagacactaaatccaaggacaaatgtgctgacagatgtcaacctgaaatagtcaaaagggtcagaatctaatttaaagtgagtttactccagcataaattggtgtgaggctgccaccccaccaccccgagaaacaccagctccaaaggaatggagtcagcctgcccaagtagggaagtgaaggtttcacttacagcagcagagagggaggagtttttttagcaggatgaaaactcattcatacaaggttggtgcatagttacagcaatttggttggttataggcagtgtttcttttgggaaagggtgcatttaacatttcttacagagggtgtgatagtcatgggttttctgtcatctggtctaagcaaagcaggacagcaaggggaagttaatcgataaaagtgtcattaatttgaaaggcaggaggtttctgtccttgacgtcatttaattctttctaggcattgtacagaacaagaaaaataagaaagccagttaatctataatcggagaacagaagttgtgtccatatgtgactgagctcacgatcacatctctgtcaaggcttaaagtgtttctgggggttccagcagcttttgaattgtatttgttttcacataaaagacaaaaaaggggaagatgcagacttatagaggaaggagagagaagagattggagtgatgcagcaaagaaaaaaaaaatgcaaaaaatgtctggagccaccagaagctgagaacggcagggaagcattctcccctagagccttcagggaaggacagccctgttgagaccttgatttggaacttctgccctccagagaagacattcctgttctttgaaggcaccgactttgtggtgatttgttatggcagcccctggaagtgaacacagttcccatcttgaaccacatcactacccgtgggtgatgccaagccaagaaaaatggccatgactttgtcgatagatcgtaatcaaaacccaaacaaaacaactgcagcccgaaatgctgggatgacttcaacaaggagacttattaagggtatatagaatgacaagccaaagcacaggacaggcaaacgtgacaacctgtggagagtgaccctgaagcaaaggcaatgaaaacttctgaaaggggctgtcacagaggcgtggtgacactgcaggaccttaacatgagcgttgatcgcttccagaactgggaccacctgcagggctccgaccccacaggaacgccctgctgagtcgcgtggctccactttagggtggatgcagggaagtctggcagaacagcctccaggatggaaaaatgacgcaaatcctgctcgaagaagatgggagcagaacagaacttcctgcagagacccaggagctacaggaggtgttaatctcacctgggagctgccagagggaggttctgaaaccagtgaaataatggagtttcaggtcgacgtcagccagacctaaccaaatgctgggacatcctggggcaggaggcctcttcccattgttggcggttgaaaagggaagagaaaacaattttcagggaggctcagggagtaaaccagaatctgaatacattttagtaaggagggagaaaaatggtaaatttccataataaagaagagggaatgtggaggaggaggtgagggggaagtggcccattagtttcaaactgctgtgggtctcttgagggcagaagttccatttcatcacttttattctcaagaaaccccttggaacactgacttaatatttgttagctgaatttttttctgtagcttaatgttagttttccatacatggttatcttttaaggatagcagtaagaaactgacattgttttgccccagggactaggaatgtcccaggtactggacccatggcttcagttgggaaatctgtgtaattgacatgatttagggaaggatttcttttttttattgtttaaacaagtatttcccttataacattatcgattcactcatcaacaagtatttaataaatgttcactgtgctagacaataggatggcgaacacagacctccacccactctgtgccaggcagcacccaagcaccctctagccaccaactcactacctactcttggcaaccctgtgaagtaggttcttatttccattttgcatgtgagaccactgaaacaatgaataatgtaattagaaataatttgcatttatttgcaatgacaaaataatttgaaatggaatgaaataagaaaaactgaaataatttgctccaattatgtggattatgtggtggttgtggggagggtgggaacgaacccaggaattctggctccagccaaatcctgggctcctcaacagactctgaacttctagatgtacaatgactgatgacaggcagaaggataccagcccatcctcacgtcacaggcagagtggtgggatagagtctttaatcaaatacttaatcaaattatgaatcaaataatgttaagtaaatatacaattacagttgcaattagccgtatagattcatcaccaaggggtttgctgtagcaaaggtctgaaaagctttcccctggaaaggcatacttaagctgatacctaaatgatgtcatgaatttggttaagaaggtgggggggatgctttaggccaaagtgagtcacaggcacagatatgactttatgtcttgtacaaggtccaggtatttcccagcaccagatgcatctaccttgtagatcagtggtcttaaaatgtggcacatagctcaggagcagcagcagcagcccctggaaacttattggaaatgcaaattcttgggctccaccccatcactactgagtgggaaattgtggagggtgggcctagtgctgttttaagaagccctccagttgatcctgagctcactcaagtttgggatcagctgctatggaagatacagtgggcacatgcccaggccccttccccagcagatgtgcccattccccgtggctgaatattggcccctgacagctcacagccaccgactacccactcaggaaggctgagtcagcactgctgagtcagcctcacaggagccttttgctcccggatgctgagctgcctgtagcctccactctcccaccagaccctgatgacacatgactcacatcatgcttgctccctgcctcaaagtaagaattgtgttgaagttgtgtaaccaccccaaggattcttcctgctcactgcacaggcaaaactgattcattgagaccatggcattgcaagaaagagtgtagccaattcgaggctggccacattatgtgggagacgaagttatcactcaaaatcaatctcccccaaaattcagaggctagggtttctcaaggacagcttggtgggcagggggactaggaaatgggtgctgctgattgattggggatgcaatcaatgggatgtggaaatcggtcctcctgctctgagtccacttttgggtgaggccacaggactgttttgagtcacagctctgggtgaggccagctggttgtcaggaatacaaaagccataaaagacatctcaaaaggccaatcttaggttctaaaatagtgacactaactataggaataattgggggaggtgcaaatcttatgacctctgaaaaactggctggcaactgtttcactgtgcctacatcttagcagaattcggtcccctcttatccttccaaactggtggccttccatgaggtttataaaggtggtttcgttttagggaaaggctattatcatttaaactataaactaaatttttcccaaagtaagtttggcccaagcccaggaatgaccaagggcagtttggagttaaaggcaagatgagggttgattagatcagatctctttcactgtcataattttcgcactgttataatttttgcaaaagcagtttcagttgtgccccagagctgccagtgagccatattctagtttagaacgtttcctgtctccttgccctctctggcctccttctgtcttctcccagagacaatttcccaataaacctcttgaacaagaatccccatctcaggttctgtttctgggaaaccttacctgatgcaggcactgtcattctggaggccagcagatagagcttgaagcaaaactgagacagagacaacagaagcatcagtgtggagcaggggacactcttccctggccctcctgccttttctttatcccaatcatgtgccttcagactcatccctctcaacagaaaaatttgcctgtgtcagtgaaaagagtcaaactctgtaaaatatttgaagagatttcttctgagccaaatatgagtgacccaggcctgtgacacagtcctcaggagatcatgagaacatgtgcccaaggtggtcagggtgcagcttggttttatacattttagggagacataagacttcaatcgaatacatttaagaaatacattggtttggtccagaaaggtgggacaacttgaaggagggggtggcttccagcctataggtagattttaaaattttctggttgacaattagttgaatttttccagtgacctgggatcaatagaaaagaatatccgggttgtgataagagattgtggagaccaaagttttatcaatgcagataaggcctccaggcagcaggcttcatagagaataggttataaatgtttcttatctgacttaaagtctgtgttgatgtatcatgaggcatgtcccacccccacttcccatcaaggcctgagccagtctttcaggttaaacttcaaaagagtcctggctaaggaagaagtccattcaaatggttggggccttagaattttatttttggtttacacctgcttgcttactaaaaacaaagaggttattggttgtgacatccttctatctgcttctactttacaatagaccatccttggacttccacttagctccaagcaaatattctcagttctcagcttttttcctctgccatgcttctgttgggcggctccctccatcaccagcaggatgtgcagtggtcagtgcataggcttctggcttcctttaagacaatcaccctctgtgcgcagcctggttgcagttgatgttctgcctgatgattcccagggctcagatgaggccaaacagatgcttcttccaggacatggacttttgggtcaaggggtgcaggactaagaacaaacaccatggctgattcatcccaacagctccactctgatgagactctccagtgcctcctgacactcaaggtctggctgctgctctgcctcctgtgctttcagacacaggtttggtattattattactattttgcctttcctctcatttcttccataagttctcctttgctcaagtaaattttctaaaagatacaccacctttatgagaacaattcgtaccagaaatatcagcatcttaacaaaattaagatttatcctttactcctgcaaaatccgttttggatccaacaagcctcttccattttgtagcttagccatgagagacaagtggccaatgagatcactactttaggacaagaaaaaaaggaggaagaggtggcgcttctggtcttaactgttgcggtgactccccacctccagccaggagacgattgcctcactggttccacgctcaagtgcaaggcagagaaaagttgagagaacaccatctcttttgctccttttaatcccaacaccattctccccacttacccttctttaccactgactctctgatcactcctggttattccttggcacttggttttgcttctggtaggtgccacttgaaaccatttttttttttttttgagatggagtctcactctgtttcccaggctggagtgcagttccgtgatctcggctcactgccacctctgtctcccaggttcaagcgattctcctgcctcagtctcctgagtagctgggactacagacatgtaccaccatgcccagctaatttttgtatttttagtagagacagagtttcaccatgttagccaggctggtctcgaactcccaacctcaggtgatctgcccacctcagcctcccaaagtgttgggattgcaggcgtgagcccctgcgcccaacctgaaaccattctcttgacatcattgagaacctccctgatccctgttccctcactaagggtcttccctcagtttcttatctgcctgcacttccctacagtatttgatgtttccccatcccttcctctgaagagttctctattccctttaaatgtataatagtgccctagtctgacctggtagtcaccttttcttatctccatatcctattttacttctgattcctaacctctgagtatacttcttcaaatttacaaactaagctctcttctttctcgttatagttttagaagctccatctagtttcataacttaagttattgcctttctgagagtaattcctaaatggtaatacttaatcctgatactgactcagaacttccggcagaaatgcaagtccatctggtttttgaacagatccacctccagatgttcatacccaagataatgatgcagtctttaatcttgtcttcctatctagtagtggatccactaagctaggtccctttggccttgggtgccgctgatggccacttctcccctaggctgccctgaatctcatgcctatgcttgtccctgagcaacctctttccatttccagaagactgcactgtttaggttttagtgaattttggctggattttaaataaattctcctgcctggtatttccttcaggatttttcatttccccgctgttccctgtggtgctagattaatctgcttaaactgctatcaaagaaaaactgcatgaggtgggataaacaggcaaggaagactttattcaagactggggcaataggggagagagattgaactcaactccactgaaacaaatggcaggatagagtttaagtgctggggtgagccagtggagagggatgggaagatgtcaggagtgaggtcggccaatgcaattaagccatctggattttctgattggtgcttataaaactaggctctcactctcccacagagatgattacatttcaaaggaatcgcttctagctccttgagaaaaatattcctgagtgtaaaactggcaagaatctaggagaagatttgtatctcacatgggcagagaaatgatttgcaatttcaagtctttctaaagttaatgctgtaagcaaaggaaggtcagaaagaagtctgtctggagtccagtgaagatgagggttatgttaggcccacatggtcaccgcacggctgacctggccactggactgctggagtccatgcaaaggcccctctgccatccagtgatcctgcagattccctgcaagggacacgaggctccaggaccttggctccatccttagcacccattcatggcctcatcgtttccattcctgatcacaccccagagggcctgtcctaaatatttctgtgcccatgtctccttcattccctgtcattccctttctccatcaccaaatgttgaattttcaaacaaccttcaaggcccaaatcaaatgaactttccataaaatttccctaaatgccacccttgggcctacaccatgaagcattagttttccattctcgttgtcttcatggcaagactaaatgaatgaatgagtgaagaacaaaggaaggcgtgaaatacatgatatggagaagtcttcctctctgtgtttcagcttcaaagttagatctaagttgtcaataccagttttagaatatggaatttacacatactttaaaatatcaaaaatgtgccagttcaggtaacgtccttctgaagcaaaatgtattgtcatctagctcttacttcaaaatgctcaagaacaatatccatgtggctactatttcagagtctctagtagcaagtgtgtaaagtactatctcttgctgagtttgggcaattgcttttgcatatgagaggactagtcattaaccagcagaattttctgtgatacctacatttccccctacagttaattctcccttaattcagaatatcctgaattttatagctcaggaatttgtgcaagtggaatttctttcacgaataacattaccttatagacaacagcacatgtacagccactttttccaatattcacgtaaatttttatggacaacaataaatcaaggctgagggaaatacaaatttcgaatagaaaagtgtaacacctatattcttgacaggaaaacattgtaagtgcatttagattttgcatctatattagcagagaagttcgtgcctgctagccctggcttaatggtgatgatggtatttgttccttttcctaccctcttctattctaaggtgaagatgattaataggttgccaaatgaatcgtacaataagctttcctgatcagagtattccttgagctaaccatgtaacagctcactgctgcacaactgaggatattgatgaatagttttatgattcatctgggcagatccatgaagccaattacttcataaggtggcatttcatcacagttgccttcgatcctctgtggctggctcattgattagagcttgccaaggaaagcaagtgtaacagtctgggatccaaaattgctgacagtcattcctggactttggcgtgggtgttctgacaatgtgcttataatttctctaggctggcttaattactctacccttatataaggtttagtaacttgacataaagtggaagaaaatccacagtaacattagacagaatctgcaaatcttagattctgataggactcatctggaactgccttcccatccaccctccctttttattgaagaatttgatcattgaatctggacacgcatctatgcatcatttgctcaatttggaggagtcagttaaattaaaaattcaagctgaaaaaatgtgcattagtaggtagttttgatttttctggcttaaatacaatagaattatatctgggtacaattgcattgatgcactatgctgctaacaagaggaacaatttgcaactagcaaatggtatgtggatccatgtacatgcataactggaaaattaggtgcacataaaatattttttcaaatgatgtatttttacacagtttgctctcctttaacctcatgctgatgcataattaatacagagatgtattcacttaactactgacttctagagactgcccgaaggcatctattccatctcagagacccaatgcagtgtgacatccaatgacatttttgccattggaatgcagagtagttaatgatgagaaagaagcttcttgtctaggaaaaaagtaggaagcaggcagtagtttcctgtagtgagggacatgggacttccttgggatcgtttccatttagtgggatggcacaagagaactctggagctgggaatcagagctggtatgccttttaaaaaataaatgtttcactatattttaagagttttaaaattataaaaataaatgtgaagatatgttatagtttgaatatatgtccccaccaaatctcatgttgaattttaatccccagttttggaggtggggatccaatcacctggtgggaggtgagtggatcctgggggcaggcttctcatgaaggtttatctccatcctcttgttgctgctcttgcaatagtcagtcctcgggagatctggttgtttgaaaatgtgtggcaattcctcactactcttttgctcctgctctggccatgtgatgtgcctgcttctgctttaccttctgccatgagtaaaagctccctgaggcctccccagaaactgagatatggacaccatgcttgtacagcctgcagaaccgtgagccaactaaatctctttttttaataaattgtccagcctcaggaatttccttatagcaatgcaagaacagcctaatgcaagatggaacagagttcccatatgttctgcaccccggcccttgttatttaaactgctttattgagatataattcacataccataaaattcacctatatagaccatacagttaaatggattttggtgtatttggagttgagcaactatcatcacaactagagcactttcattaccctaagaagaaactcagtacccaacatcagtcactcctcttgcttccaaacccctcagccctagtcagcctctgatcaacacaggcctatcactatagatttgcctattctggacacttcgtataaatggaacaatatatgatgtggtccttcatgactggctgctttcttttgatgtaatgttttcaaggttcagccatgtggtagccagtatcagaacttcattcctttgtgttgccaaattataggttatactatgaagatgccacattttatttaactgtttaatagttgatggacatggtattgtttctattttttggctactatggatattactgtcatgaacatttgggtgcaagtttttgtgtggccacgtatttttatttctcttggttaaatacctaggagtggaactgccaggtcatatggtaactgcatgttgactcttttgaggagcttccagactgtttttcaaagtgatggcacaattttcctttcccctcaataatgtatgagggttgcaatgtcgctacatattaccaacatttgtcattgtctttctttcttttctttctctctctctctttcttttccttctttctttctttctttctttctttctttctttctttctttcttttctttccttctttctttctttctttctttctttttttttgggatggagtctcgctctgtcacccaggctggagtgcagtggcatgatctcggctcgctgcaatctccacctcccaggttcaagcgattgaactcactgcctcagcctcccaagtagctgggaccacagccgcatgccaccacacccagctaattttttgtatttttagtagagacggggtttcaccatgttagccaggatggtctcaatctcctgacctcatgatccaccctccttggcctcccaaagtgctgggattacaggtgtgagccaccacacctggccatctgtctttttcatgatagacatcacaggagtgtaaagtgacatttacctatattggctttgtatttccctgatggctaatgattttgaacaccgtttaatgtgtttattggccatttttaaatcttttttaaagaaagtctattcatataatttgctcattttagaatgagacattttctttaagggttcttttcttatcaaacgaatgatttgtatatgatgctgctatgtaaattgttttcttaaatttccttccaccctgtggcttttgtctttattttcttggtgctgccctttgaagcataaaaacgttaattttcataaagtcaaattgatcctttgtgcttccagtatctcatttaagggaactttgactaattcaaggtcatgatgatagacgtctgtgcttccttctaaaagttttatagttttacttcctacacttaggtgtttaatccattgtgagttaatttttgttcatggtagaagggagggttctaatttatttcttttatagctggatatctagttgtcccagcatcatttgttcaaaagacctatttatgtttaactgagctgtctcgacacccttgtcaaaaaacgatggactataaatatatgcgtttctttccatgctctcagttttatcccactggtctatacgtctgtcctattaacaatatcacactgtcttaaccttggatctgtagatttggatagtattgtcatttaaaaaacactaggtcttttgatttatgaacatagggtattttaaaatttatttaggttttttgaaatttattcaacagtgttttgctgtttttcagagtacagctgcccctccgtacccatgggggattggttccaggacccatatgcaaaccaaaacccatatgcaaatggataatcaagtccctgaggtaaaatgcttaagtaactttgcatataaccccatgaacatcctcttgaatattttaaatcatctctagattactggtaatacctaatacaatgtaaatgctatgtaaatagttatactgcattgtttagggaataatgacaagaaaaaaatgttgcatgggttcagtacagatgcacccatcctttaaaaaaatattctgcgtctgcagttggttaaacccacagatgcaaaacccacaaatgcaaagggacaactgtgtaagttttgcactcgttttgttaaatttattcctaagtatctctttatttttgctactattgtaaattgttttcttaaattttatgtttgtactgtccattggtaatgcacagaaatacaattaaattttgtatgtttatcttgtaccctggaacatgctgaacctgattattagttttataagtgttttagtggattaattacaattttctgtttgagagatcatataatcttcaaacagagatagttttacttcttcctttccattctggattttttaaatttcatatcttatcctatctacacctccactacaactccaattgaataaaaatggcaagaatgggaatctatgcttgattcttgatcttagggaaattttccaccttttaaattaagtttgaagttaactatgggatttttcataggtgccttttttcttggtgaggaagtccccttttatttctagtttgctgaatgttttatcatgaagggacattgtgtttgtcaaattccctctttgtgtaaattgggataataatgaagtttttcacctccttgattctattgatatggtgtaatttttttttttttgactgggtctcactctgtcatccaggctggagtgcggtggcacagtcttagctcattgcaacctctgcttctccagctcaagcgatcctcccacctcagcctcccaaatagctgcgactcctatattacattatttattttattgttctaattttgaccatttggagctttttctgctggctcatgtgttcctttgacatgccacatcattgtgtgagcgtgtgtatctgtgtttggttagcactatatcacttattgatactaaattgatgatctaggataatcacatcttttctaacttaattctataatcagtcatttctccaagaagccctacttcctttcattggagaatagtgttagaaatcaaaatattatcacttaatattcttgttattaatgaggtatcattacttctaggaaatctcaggtaactgagcaaggaaacgtgtaaataccaacccatgtctacacacctatctataaatatttctagatcaatctctccctctctctcaagctaaacttaagttcatacagaagtctcttatccactaccacatggattattctagtcttctctcattgtttatctataaagtcccacactaacagtgagtaacctggcttcaaccatccaccatccgtttactcaattatttatctctatttacatatatagcagtatagaattgctaaaacatactcccatgggaaacaacattatcaactagaccatggtgcttatgtgcagattttttttttagttttgcatagtccactcatttccaaagctacacaggtcagcaacattttccccacttccgccagtggcattatgtcatttatcagcaacatagtcagatgtttcgtcacattccatgttccatctcagaattccccagctacctaaatgctttttatttatatttgcatatattaaggttcactttgtgctgtaatgttctttaggtgttaagaaataaataatatcatatacacactattagagtgcaacagaggatagtttcaccatcttaaagagaaattcctgtatttcacatactcaacattctcctcctcgcataaatgtctccaaatctgttcttttttttaaatgttgtgtggactagtctatgtttcttgactttccatataaatgttagagtcaggttattcatagttacaaagtggctcactgagacttttattagtattgcattgaatttataggtcaatttggaaaaaaacagacactttaacaatattaaatcctccaattcatgaacatggactatatctctatttacttagatgttattttattttctctatttttttactttcaacttcattgatttctgctctcattttattcattacattttttcctcatgctatagggttaaattgtacacctttttctggattcctaaggtgaaatattatattgatttacatttttcatctttctaatacattcatttcatgctatacattttcttttaaagaatgctttcactttcttccactttttaaagtaatttttatctttatttagttcaaattactttttacatttctcttgagacttttactttgatctatatgttatttagaaatgtgctatttaatctccaaatagttggaaattttctagttatttttgctattatttggtttctggtttagttccattgggatctgaaatatatttttatgattattaaaaatttattaagtgtaataatttatgacacagaacgtgatttattttggtgcatgttccatgtgaacttcagagagaagcatatccttctgttgttggatagagtgttttataaatgtcaattaaatcaagttgattgatagcactgttcacatcaactacggattttctgcttgctaaatctatcaattactgacaagaagtctgttgaaatctccatttattatagtggatttgcctatttctccttgcagttctatcagtctttgcctcaggtatttggatgctctcttgttaagaatatgcaggtatacccatctgattgtactttgtttcactgcactttgcagatactgcagggttttttttgtttttatttatttatttatttattttgagatggagactcgttctgtcacccaggctggagtgcagtggtgtgatcttggctcactgcaacctccgcctcccgggttcaaacaattctctgcctcagcctcccaagtagctgggattacaggcacccaccaccacacctggctaatttttgtagttttagtagagacggggtttcaccatcttggccaggctggtcttgaactcctgacctcgtgatccaccctcctcagcctcccaaagtgctgggattacaggcgtgagccaccatgtccagctgatactgtgtttttgacacaaattatagtgttgtggcaaccctgcattgagcgagtctatcaacaccaatttttttccaataatttgtgctcactttttgtctctgtgtcacattttggtaattctctcaatactttaaacttctaatcgttattatatctgttatggtcatctgtgatcggtgatctttgatgttactattgtaattatttgaggaaccagaaactgcacccatataggactgcaaacaatcaataaacgtgtgtgttctgacagatctcctgaccggccatccatctctctccctctcctcaagcccccctattctctcatccacaacattattgaaattagggcaattaataaacctacagtgacttccaggtgttcaagtgaaaagaaaagtcacacatctttcacttgaaattaaaagcctgacgtgagaaatgggagaaaattttcgcaacctactcatctgacaaagggctaatatccagaatctacaatgaactcaaatttacaagaaaaaaacaaacaaccccatcaaaaagtgggcgaaggacatgaacagacacttctcaaaagaagacatttatgcagccaaaaaacacatgaagaaatgctcaccatcactggccatcagagaaatgcaaatcaaaaccacaatgagatatcatcttacaccagttagaatggcaatcattaaaaagtcaggaaacaacaggtgctggagaggatgtggagaaataggaacacttttacactgttggtgggactctaaaccagttcaaccattgtggaaatcagtgtggcgattcctcagggatctagaactagaaataccatttgacccagccatcccattactgggtatatacccaaaggattataaatcatgctgctataaagacacatgcagatgtatgtttattgaggcattattcacaatagcaaagacttggaaccaacccaaatgtccaacaatgatagactggattaagaaagtgtggcacatatacaccatggaatactatgcagccataaaaaatgatgagttcatgtcctttgtagggacatggatgaaattggaaatcatccttctcagtaaactatcgcaagaacaaaaaagcaaacaccgcatattctcactcataggtgggaattgaacaatgagaacacatggacacaggaaggggaacatcacactctggggactgttgtggggtggggggaggggagagggatagcattgggagacatacctaatgctagatgacgagttagtgggtgcagcacaccagcatggcacatgtatacatatgtaactaacctgcacattgtgcacatgtaccctacacttaaagtataaaaaaaaaaaaaaaaaaagcctgacgtgacaaagcttagtgaggaaggcatgtggaaagccaagacaggcctcttttgctaaacaattaaccaagttgtgaatgccaagaaaagttcctgaaggaatttcaaagtgcaactccagtaaacacacaaatgataacaaagcaaaacaacctcattgctgatgtggggaaagctttagtggtctggatagaagatcaaacctgccacaacattcccctaagccaaagcctaatccagagcaagaccctaaccatctccaattctgtaaacgctaagagaggcgaggaagctgcagaaaaaaaaaaaacaaaaaactttaaagcttgcagaggttggttcatgaggtttcagaaaagaagtaatctccattgcatgaaagtgcaaggtggagcagcaagtgttgatggagaagctgcagcaagttatccagatctagctaaaatagttcatgaaggtggctacactaaacaacagaattttaatgtagatgaaacagccttcaattgaaagaagatgctatttaggacaggctgactcttgttaggggctaatgcagctgatgactttaagttgaaaccaaggctgatgtacccttctgaaaatcctagggctcttaagacctatgctagatctactctgcctgtgctctagaaatgaaacaataaagcctgaatgacaacacatctatttacagcatggtttactgactgttgtaagcccactgttgagatctactgctcagaaaaaagattccctttaaaatattgcttcttggctgggtgcagtggctcacacctgtaatcgcagcactttgggaggccgaggtgggtggatcacgaggtcaggagttcaagaccagcctggccaagatggtgaaaccccatctctactaaaaatacaaaaaaattagccgggcgtggtgggacgcacctgtaatcccagctactccagaggctgaggcagagaattgcttaaacctggaggggcggaggttgcagtgagctgagatcgcgccaccgcactccagcctgggagacagagcgagactctgtctcaaaaaaaaaaaaaaaaaaaaaatgcttctcattgacaatacacctggtcaccaaagagctctgatgtagatgtacaaggagattaacactgttctcatgcctgccaacgcaacatccattctgcagcccaaatatcaaggagtaatttcaactttcaaatcctattgtttaagaattatattttgtcaggctatagcttccacagacagtgattcctctgatggatctggtcaaattgaaactttctgaaaaggactcattattctagatgccattaacaacactcattattcatgggaagaggtcagaatatcaacactagaggaagttggaagaagttgattccagtcttcctggatgactttgaggggttcaagatttcagtggagaaagtaacctcagatgtggtaaaagcagcaagagaactagaattagaagtggagcctgtagctgtcattgaattgctgcaatctcatgataaaacttgaatgcgtataaggagttgcttcttatggattagcaaataaagtggttcgttgagatggaacctactcctggtgaagatactgtgaacactgttaaaacgacaacaaaggatttagaatattacgtaaacttagttgataaagcagcagcagggtttgaaaggattgacctcagttttgaaagaagttctactgtgggtaaaatgatataaaacagcattgcatgctacagggaaatctttcatgaaaggaggagtcaattgatgcagcaaacttcagtgttgctttattttaagaaattgccaaagccaccccaaccttcagcaactaccaccttgatcagtcagcagccttcaacattgaggccaagaccttcccccagcaaacagattatggcttgctataggttcagatggttattagcactttttagcaataaagtatttttaatgaaggtatgtacattatctttttagacataatgctgttgcacacttaatagcattatatacactgagaaaccaaaaaatttgtatggctcactttattgcaatgttcattttattgtggcagtctggaaccaaacctccaatatctccaagatatgcatgtacatacttatggttgctaatttttttcttagaaaattgaccctttattattatgtgaagcttcttttcatcctcaatagttttcctttctttgaactctgctgggcttgaaatcactatagccaccccagataattttcactggtgttagtgtgaggtatcttttttttccccatccctttgcattgaatttatctaagtgtttatatttaaagtggatttcttgtggacaacatgtagtcaggtcttgtttatttatcttttctactctagtggtcttattttttaatccactcaacaatcttttccttttaactagtgtattcagaccattcatatttacagtggttattgatatggttggactaatgtctaccatgtttgtatgtgttttctttctgttgcagttgttgtttgtttctttataatccctctacttttctttctcaattgagaatttcatacgattatattgtatcacctgtcttagaatgttggcgatacttctttttgatatgcttagtgtttactctagttttctatgtacatttttaactaatataagtccacttccaaataacactatagcatttcacatgtcctataggtaacttacagcgtttcccactttctcccttgcatcccgtaagatgctactgttatttatcttccccacgtgctatattcattacctgtctgatccaccgagaatgagaaccatacaatactctattgtattttcattaactttttctctgaagctcttcctttttgtatgtggatatgaattttggttctatagcatttacatttttctgaagaacttattttacaatttcaggtagggaaaacctgcagccaatgaactccctcagattctgtttgttagagcaagtctttatttctacttcacttgtgaataacaatttggtggctatagaatgctaggtgaataggggtttttttctgtcaacactttaaacacttatctctgctctttattttgtttatttttttgtatgatttctgatgataaacccactgtaaattatgtccttattcttctaggtttgctcctcagtgagtaaaacaatttttttgtctctagcttcttttgattttcttttcatttttttgttttctgcagcctaaatatgttatgcataagtgtatatttattgataattaacattcttgctattgggtgagctttctggatccatatttggtgtctaccattaactttggaaattccttggcaattattacttcacaatttcttctgatctgtctctctttaatctccttttggtaatccaaatattcatgtttttcaccttttcacattgtcctagagatctttgatgtcccattcgtgctgtcgtcattggtgctgttctcaattttttttctttccatctcattttggcaagtttctcttgccatattttcaggctcatcaactctttcttcccttctctcccatccatgataagctcatcaaaggacatgttttatttgtgttatagtaggttttttctgagttctactatttctgttttgttatttcccagagtttccatctctcttcttaccttacccatctgttcttgcatattatgtactttttttttaaattaaatcctttaacatgtcaatcatcgttttataattccagtatctgaatcaggttacctgactaaagttttatcaatggttttgggcactgtggcttagcttggtcaacatttcctaaagtgaggcaagtgaaacattagccctatagaattattttcctagaaaaaaaattgtgcatatccatttattagatatatacttattaacaatctacactagatattagtattttaaggatttattgaatgtacaattaattttagagggctacagtagagaaactaatttgcctaacaaagagatttctcaacttatttgagtttagagatgtttgtggatacctgtatttcctaggtcttgtattccctggaatatgctttggtaaacaatactgtaattgaaatatatttctcaaccactcctttattcttttctagattttgttaagaccatgcatttttttgcatataataggttcaaaaacatttgatttgatatttattatggtattcactatgaaactgtcccagaagtcttaggtgttcattaagtcttttatttgtatatttttagttatgtgttttttaaacttagaaggcaaagcaaatgtatagaatatctttacctagtcagcatctatgaaagctccagttccgaaagaaagcaaaagtttattttttttttcatataccaaatgctattaagtgccaaggtatgccaagtatagttctgaatgttctgtctcagctgaggaaagagaaaaggtcctgcatgacagagtgtatagtctaagttataactctgtgttcttgaaacagcccttccctaagagacacacagatcacggcttgtactgtttcttatttgttaaggcctatgaatcataatgaagatgtgtcatgagaaagcctgacaattctaatatttccttaggacaacctgcatttaaatcagggatttccaaagtgtatgccatgaagcactatggagtgtcattatgtgcaatgaaaaatatgttccaagatgaaataatctgcagtactttgtgtttaagaaaattaaccctatttacttagcgaaggcattcttagcacctttaacatacgttcaatactgttatgccaggttaatctatctgtgtatgagggggtatctacaacatttcccaaactagctttccagggaatatctcataaatgtgatgttccataagttatgtttggggaaatacatttctattccctgtgtacataagaaatgccaatgtactcagataagaaatttgtaaatgtgccaattttataagcccccttactaaggaaggaaaaaagtctcagggggaaacataccaaagttataattctgaatgatttggactttaaagatgctttacatattcaaaaaaagtcaaaaaaggagaaaaaaatcacattgcaaactgaaaacaagctgaaacaaatcggcctatttttatatcaaagtggtaacataataacatggagaaaaattatttcaagtaatctttgaaaacagcaacctgactttaaatccttggtggttatattgaaaggatgaagagaattatagagaaatcttgcaattcactcagtggttttattgttagtagtaatttgggtatcataattttgacatcatttaatgtatcttttagaataaataactgttaatgttattagtgcaaacatatacatacctatacacacataaaatcaaaaaggataagaaaccatgtcttcgtgaattttccaggaaatagtaataaaacagggatttaaagcacacacacacatgcacacacacacgcacacacacacagacacacacacatcctagctttacctactcagagggttttaaaagcagggatgcctcggagctggtagcatacgagcttagttcttggcttctaagcagcatttcccattaaaagaaaggagagctcaaagacatacaatgatgtatcaaaggtgaatccattggataaatgtgggataatttaagcatcaaaaaacaaaacaaaacacacaatgtgggtttctttttttttttttttttttttttttttttttgagacaggatctggctctgtggtccaggttggagtgcagtgctgcaatcacggcttactgcagcctcgccctcccaggctcaagcagtcctcctgccttggcctcctgagtatctgggaccacaggttgtgtgtgtgtgcatgtgtgtgtgtgcatgcgcgtgtgtgtgtgtgagcgtgcaagcgcgagcatgtgtgtgtgttttaaaacatttttaaagttttcttttgtagaaatgtgatctcactgtgttgcccaggctggtctcaaactgtcaaactcctggcctcaagtgatccttccacctctgctttccaaagtgctgggattacaggtgcgagccactgtgcccgaccaccaatggttttaactgtaaatacatgagccaataaaaatattgaactacaaaaaaacccagagcagacgcaaagtgggaaacccaaaacagagagtgtgggagaggaggggatgcgcctcccaggttcctcttcagaaaatcctcggcagagcagcagcagggggcgcaggcagcacctgagcttcagctcctcccaccaggctctgcctgggatccagggagcacctccctcaggctagtgctctttggggtgtcaggagccctgagtgaggcaggatggaaagtcctggccacttcagtcccacacagggccactgggcagctgacccgttctggaggcgatgccggccccagagttttcctccaggttggccagggcttgctctgcctgcactacagttcagcttctccctctgcccagttctccccttccttcataggtgagcatctctaatacacatcctgcagcccaaactccatcttcgcattagatggggagggggaatccaaactgtaacaagagaacagaaaaagaaaactcatttgtcactattaaaactgacaatcaggaccacattttaccctgaaagttaggaaagaattaagcatttacccagaaccagtttatcctcagtgtgagaaaacaatttaaatggtccattttcagggcatgatgaatctgagcactggcagccagcctggaaatgtaacaaactgcatggctcatgcacctggaaggtcacaataagtgagcagaatggagaggaggggtcggcccataaaagggaagaaagtttcatgattgggaaatcgaaacttaagcggggaaggagacggggtataaccttataagggggatgaaatttaggcgacgtccaggaagatcgtaaccccggagaactcaaccaatgaagaagtgggggagggacttgcgtgctaggagataaatcacctgttgtgactgccctgggtgtgcctgcctacaagacagcccatcttgcaagactgttattaaaagtctcagtttcgctgatcttcgtgcctgtaagtccatcctttgggtttgggcagatgagtgtgtttctcacatcagttaataagaaaagctgttctttataggaatatagcaagtaataagtgaggaaggagggatacagttagaaaaccacccttccccaagctctaaagaaatcattgatcctgacagacagattatcggtgatggctaaaatcatttgggagaagattcttgggaaagggacatagtctctgcaaaattattattttagaaaaacaaaacaacatggcagtaagggaggtggggtaagaactgtagaaaagaggggacagattgaaggccatccccaccaaagccatgtgtaaatgtgtaaatgttgactggttgctggaaagtggaaaatcagcttgaaacactaactcccccttaaactgtgggaataacatgccggagttcaacatggggatgcagattgacgggtatctcttacatccttacatccttacatcctatgactgaggggtgagcggggagtagagatttgtgaatgggtatttgctgttgtggcttgccccctgcattcattttcttcttaggataaggggatctcagatctcatttgctgaatcatttacatcccactcaacgatccctgggtttgggtgggagtagccacaggaccaaccccaagaattgtgtcactggcacctggccattcaggcacagtgactggacaggggtaaccacacgacacagggagccctagtgctttttctgaaaccactgggaaagagttatagacttcattaaaaggttagtaaatgagtaggtggtcagcctggagctacatgctgatccatacaacagcaatggtggccctgcctgagaatagagcaaatgcaaatgcaaccaaaggcagagaaggagaacgacagcatcatctggttccccagatccagccataactgaaagcaacccccagacctttccagaaatagaaggcagtaagtttcctatttgtctaaagccagtctgatttgtatttctttcctttgcaactaataaagtgctgaataaaatatatgtaatagtcaaaaatgtgggcaaatttaggtgtatatatgtgggaatcttttaaaaattttcatagaaaaaagcatgcaaatttttatttttaaattttaattatgaaacatttcacataagcataaaagtgcagaaaagaacaaattatccatgggcccacctctgaacagatattaacattttgtcatatttgcttctgagttctttactgaagcatctgcgtggtttgaaatgcaaggtaggaagagtataaagtgttctatctgctctttctgtctcctgagatcttttcccttaacgactttcaggattcgtggatttcagtgtatcttttcataactattcaagtacatccattggctatacattttaccacaaattacaacatttatgtaattagacttatcctttgcattttccaaataatatatattggagattgtttccttataggacatatagagctgatgcatttctttagcagctgtgaagcatccctaaatctaagtcaaacattttgtataattgtaattttgatagattttacaaaaggtccaatgtagaggtcatatcaatttatactcccactgattatgtatgaaaatctatgccacaaaggctggtcaggtttgaatgatcaaatctttgccaaggtgatcagtgaaaaaacggtattccgatgttgtttaaagttgcattttatgttgagcatcactgcatctatttaagggccacttgtatttcatttgtattttgcacctattttttattggttgttttaaaattggacacacacacacacacacacacccacacacccacactggccatttgtgacataaatagccaatgaattttccagtttcttattggcctttttacttttcattatggtgatttttctcatatagaatttgtaaaattttatttctatgtcaccaagactaatctattttagggttttgtgtcatttttagcaaagtgttatgggttgacctgtgtcctccccagtttaatctgttgaagccctaacccccaatacttcagtatgtgactgtttgcagagacaggacttttaacaaggtaattaagttaaaatgaggtcgtatctgtgaactttgatccaatatgaccggtgttcttataagaaaaagctacagacagacacacatgaagggaagaccatgtgaggacccagggagaagatggccctctgcaagctgtggagcgaggcctaaaacagatcctgccctcaaggtctcccaagaaacaaaccctgctgacatcttgatcttggacttccagcctccaaaactgtgaaaactaaattgctgttggttaagctctcttgtctgcagtactttgttactacagcccaagtcaattgagacagaagaatttcttacattaagatttttaacacgcaaagagttccattatcctccagcagatagattactttattgtcaacatttttatgcatttcttattttttgtgtcttcttcagtgggtaaactccacttcagagagatgctaccacttctaaaagaagggcgaggagaggagatcccagcactgggtgatgactgggcctcccccgtgcatcctctcttacccgtctctgccactgctcccatagggggcgctgagccctgataacaggtatggtagcaactacgatgagacttagctctccccaaagaaaacagaatgggctggaagtgtgttcactccattcaatcatcacgcaacatatccagtaacgatctctcagacatagcaagagaacatttcctctatgtagcagcctgtctgccctgcccaggaagcacactcagcagcagccccaggccacgggcactccagcaggtcttcctcaagcactggtgagcagcagagaattcttacaggctaataccctatccaacaagctgtgcttgtgtccccagggagagatcaagttagaaaaactcatcttgaacagaattgtattcacagctctggcttgtgcagagctggttttgttttctaatcaagcatctgggctgaatatttattcactttcgcctgctcgtaaactcattgtatggcttttaagtgggggaaaaatgtcccgtttcattgttagttgatactgaaagtgtttgataaaagagccaatttgtccttttccccattggatttagattcgagttaacaaaaagtcacgactgaagtggttggtcatacatcaaagagtttagatctaatgggcttttgaagagacagtgtaaacatgtgggaatagtgttctaaggcagtaatgtttctttagaacaccatgaggcttttatgactatgaacagtgtttaaattttaaatggcttttaaataagttctttcaacctctctttctttcctcttgccacaattggactctaagtacatcttgtcagtattgtaccaatcataggtattgtggttagcatgcaacattgctgcaggggaggcaagaagacacatttgactttccatgctatacatttgtcatcatatgaacagggcttttctgcatgtattattggtcacaagatcacttaacactcttccaggactcttctcacagcctcagattggtcagttctgtggaccgtgctggtattttctggattcatcttcaacgtgccctgctaaggtgccatagaaccaaaggtcagataatggaacgctagactattaacactataatagactggctcaccgttggatgtccagcatgtaacatagtgcctcgtacctaggaagcctcaatgagtgggtaatcttttttaaaaattgtgaactgagtaaatagaccaaccttcaaaataaggacaactagaaaaatcatacaacatattaaaaatgttgcaagaatgcgatagaatgcaaacatgaaagtgatggattactgggatatgagtccataaagatgctctaacattaaacatgatagtgatggattactgggagaagaggctgggaagatgccctaacattaaggggtgctactcctctgtggtcattgacgtgagccagaagtagccaggccattacagactctgcagctcagcttctaatgatctcagtcactaaaaagggataaagttgaacccagattactataggaaagttaaatggcatcagctgggacccaagtcatttctgcaagcaactgtaaaaacacaacgtccaggacattatataaaatagccaggctcatgagatggaaagataacatatttaaaaaccaatagaaaatacagataacagggacaaattcaaagggaatccaaaaaaactgagctgtggacctaataaaatcccaacaactgttattatcattcacgtgcaaggaagtaaaagccattgagaatttttagaaagaacccagaaactgttaaaaaagataatcaattgaaaataatgaaacagaaaaaaaaataaacaaacatgtagaacttggtagatttaacataaattggatgcagaatcaattagtgagatggaagacaggttagatgtcaacgtcaagagtaaatcacagactgacaaattgtggaaagtacagaaaggggcacaagagacattgcagataccaagagaaggatgggcgcatgtgtaatgggaattccaaaagagaggagagagaaaattgaacagaaacaatattatattggcagataacttttcaaagctaaaaaaagacaaaaattacaaatctaaggagctttataaatccaagcatagtaaaatttttaaaaagcatatgcactaaggtatattacagtaaaacatttggaaacaaaaggtaaagggaattttaaacattctcaaaaacagccagatgaaaggggccgggttcctccaaaagaacaatgagaactgaaatccacaactctcttctcaacagaagaaacgcaagcccaacgcaataagactatgaaaaggtggtaaagggctaaaagaaagcaactaccaagctggaattctgcccagcacaataataacttttagtgatggagaagaaataaatacattttcagacaaatatatgagcaattttagcatctccaagccagcactaaaggaaatactgaagttgttcatcaagcagaaggaacctggctcagacagagcagagaaagtaacaaagaacaaaaaaaaatggcaaaggtgaaggcaaacataaataatacgggctgtataaattaccgtaataaaatcctttaaaataatacagcttaggccaggcgcagtggctcatgcctgtaatcccagcactttgggaggctgaggtgggtggatcacctgaggtcaggagttcgaggccagcctggccaatgtggtgaaaccctgtctctactacaaatacaaacaattagccgggtgtggtggcggacacctataatcccagctactcaggaggctgaggcaggagaattgcttgaatccgggaggcagtgactacagtgagctcagatcacgccattgcataccagcctgggcaacaagagcaaaactccatctcaataaataaataaataatataatataatataggttactcaaggagttgttcctagttcagttttgtggcctttcatcctacatatacatattttgtttgcagccaattctcaagggaacccctctgcagatttctggacctcttctgtgtgcagctcccttctttcaagtcctctgtccctcaatttcaagccaattacatccccaccaactctgtctcctcaacttagcaaaatcatcaggctaggtgtgagccactactccctgttttgtagtctgaaatttgcttttagcagagagcttgggcaatcttagggctcaacttgctaattcctcttctcgtgcggcccattttcctaccctattgtacaatatccagttttctatctgttagttcagaaattatattcactttccttcattcactgaaaatcttctaaggataattaataaatgcctttcctataattcatatatagttcatcaatattttaaactttaatctagaatgatgaacactaataaaacttattagatatctaaaggagcagacaaggtggcctgtaaccaggagaaaagtcactcaacagaaacagaccccaaaatgacaatgatgataagatttgcatacggggaggttaatacaactattacaaacatgcttcagttgctcgaggatgtaagaaaaatataatgagaagagaagtggtcagtataaaaaaaaaaaagaaaggaaacttctgtaaagatagacaagcaggccactggatacaatctagagtctggagcatgccccacctatgtggacagtggacttaaaataaaggtggcattacagagctgagtctagtcaaatacacagtggtggataaagtgtatgtccacgtaaggcacaaaggaagcatgatttctatattatgccacactaaaaaccagccgaagtggatcacagacctaaatgtcaaaggtagaaccatggagaccctcaaacaggagaatattttcattacctcagaagttaggacattgtttttcaaatcccagagtagtaaaacaaaaaaaaaaaacaccagtcataaaggaaaagatttctaaatttgattatattaaaattaagaatttcattccttcaagagacacactgaaataagtgaagcccctaggttgaaaaatatatttacatctcacctatgaagaggtactattctagaagagtaggagatacataaagacctctttcaaatcaatactgaaatggacaacctagcagaaaagcaggcagaagacttgaatcggctcctccaaaagaggatagtcaaatggctaatacatgtatgaaaatgtctcaaccttattagcagtcaaaaaatgcaaaatgagagcaacatgaggtacctcttacactcaccagaagggctaaaattaaaaagactaaaatacaaagatacaggtcaggatatggaggaagaggaactcacatactactggtagggatataaactgaaacaaccactttgtaatagtgttctgtatttgaagctacaccaatattatgactactattttactattcctcaagtaggtattttttatacattaaagaaaaagggatgaactgtagccatgtgcaacagcatggatggatgaatctcaaaaatgaacactgagccggccgggcgcagtggctcatgtctgtaatcccagcacttcgggaggctgaggtgggcagatcacgaggccaggagatcgagaccatcctggctaacacggtgaaaccccatctctactaaaaatacaaacacaaaattagccaggcgtggtggtgggtgcctgtagtcccagctacttgggaggctgaggcgggagaatggcatgaacccaggaggcagagtctgcagtgagctgagatcatgccactgcactccagcctgggtgacagagcgagactgcatctcaaaacaaaaaacaaaaaacaaaaaacaaaaaacgaaacaaaacaaaaaaaaacactgagccaatgaagccagacttcaaaagaatatgaactatgctattcttttcatctcgtatgtttaaaactaaactgtaatattacagtagtgtgcttgtatgataaaactttaaagaaaaggaaagaagggattatcattaaagatgggatagcaaaatcactcctgagagtggggagaaagtgatttggtggggcgagaggggacttcggggtgtagaaataatctatgtctttatctgggtggtgatgtactgggggctcattttgtgaccaagcactgagatgtacatttaacatttttactcttttctgtatgtgccatattcataatagcacaaatgttacacaaagaaaaagcaattcagggtttgagttagatgtcctttcaggcaaatagctcccacaagaaaaagtcttagacaagaagatcaaggaaaatgtgaagtatgtatcacaagattccagagcagagcataaatataacaggacagttcccattatgttcccagggcaaattcaggaagtagagtatactaaaatatgctgatacagaatctgatgtgagcccattgtagtgtgggagaagggaggagaggagaggagaggagaggagaggagaggagaggagaggagaggagaggaaaggagggaaggaaggaaggaaatggagggaaggaagggggaaggaagcaaggaaggaaggacgaagagggaaggagaaggaaggaaggaattaagtgtattttaataaaagtgcatgttcattagaaacttttttgaaagaaaatattgtttatcaagtgaaagagataaccagttgcaaatgccaccgtttagaaataatcacctgacactgtggtataggttttgtatctctgcatctatatatggatatttctctatctatatcaacacaatgcaaggcatataggaactattcaataaatgctattttccttcttacctacatcataggaaattgcttttattattctgtttgaaacctgtgattttgatccaatgttataatataaaggaagaacaagtttctttttttattctaaaactttgacattatggaattcaatagctggtggttttccacgcagtgctgtttttgtgatgcatataattattatcatctaacatttacggagcaccctctgaggaaaagacattgtactagatacagtatgaacaatatttcaaagaaatcagcaactatagcaacttgcagaaaaaaaaattgatttttaaaaagtaatttgactttcttggggaaatatttaattacatgtggacatatttgcatattttctttgtgacatgcttatttcaaaagtaagagaagatctattaaattgttacagactagagggaaagtaagaaatccagttatttatagttttggggaaaatgcaaaagtgcaaatgccattctctactctttttctatctatctctccctgctttatcgtttctaatcttataacaatgacagaagcctccatgttgctgattctcactttagatcttaagtaatagctgcctctttaacctcaaacagttatttctaactacccacgagccacttctacctgatcctcccacaggaagctcaaaagcatctatggaaacctaaactcatcatcctcccctcctcctccaaaaagattccctactaatttactaactgatactgcaacatcatcagtctctccagcttaagtcttcagataaatctttgacatttcactcttcctcacccacattgaatgagtcaacaatccttgattacgcctccttaatctttcaattccattttcctccaccatctctttactcactgagtcagcatctttcacctttactcttgtaggagcctctaaaaggtcttatgctcatcacctgttagtcttttctatgcaatagtcataacattctttttaacactgatcttatcatgttatatcgaagatgaaacacatttatgattccccagtgcctgcaggacaatgtcaaaatccctaaacaagacagccaagccctctcattaatgccccaattcaagatgacagcatctcctcttatgtttgatgcaaatttcagtaaccagggcttcttataatccttttacacactattggatttcatgtctccatgtctttgcctgaaatagacttttttttgtatcagttatagcaaacttctgtttatcttctaaggtcaaacacaaaattcaccctcagttttttttttcttacctacaaaattaaacatacagtttttctgttagggtcctgagcaggacctactctatccagtcaccttcatgcatcactcaccgacacagtgctcattcattctttcaaaaagttggtgagtacttaataattgtgtttgagatgccagtcacaattcaggcactggggataccaggtaaataaggcaggcttctgtctgacctctttgcatcttcccttctcatggtgggaagcagcagaacagaagtaaataaataaagttatgaagaaaataaaacagggtcatgggatagaatatgactaggtgggatctacttagtgtagcctggaaagtcacttctaatgagatgaaatgataacacatctgaattatgacaaggaactaggcatgtgaagaggcaataaagcttgtttcagaaaaagagaacagtagttgcgatgacctgagcttggaacatactggtagcgtgcacagtagacgagtgcgcccggatcatggccagcaagaagtcagtggcatgaggccagtccaaggctggatcacagagttcttcttttgtaactctttttaaaaagttttaatgattgccctaagggttacaatacacacctttaattaattacagtctaccttctaataatgttacagtgtttcacatgctgtataagaaatcttacagctgtataattccgatgtctcctctccatcttttgtgataatataaaatgtattgtcacacagtttacttttacatagttataaatccataatgcactgctactgtttttgtttttgacaattacctttcagagtgattaaaactaagaaaactatattttgtatttatattcattttaaccatttctggaggttttcatttctttctgtagatccaagtttgtaagtcatattccctttgtcagaagaatttcctggcacactaatcttactgcaagatagctgataataaggtctctaagttttttatttgttcaaaaaatatttatccctcattattgaaagccatctatactaggtatagaattctgggttgacaattttctttccagctttttaagaattttactctattgtcttctgacttgcatagtttctgatgataagtcttatgtattttctctttcttccccctctatataatgtgtcaatttttctttggattcctttaaggtttgctatttatctttggttttcagcagtttgagtatgtgtatttcttttaaaataattttaaataagtgtcctctctgtgtgtcataacatttttttttacacttgaatgctgtttacctgtaaatggcatgtgtagaacaatggagattgatgtaaataatatttatgcctgatgtgggcatgcaacttttgatagactgttggggctagagttgagcctctctagccaggagttgagctaagtgtgggttttgttgctactatggttactggctttacataactctggcattacctcatgcttccagtgggggctggtttactggagggcttttcttaacgatactactcaccctcactttgggacttccctggatgcctgcacatcacaaagagtctcctccatgcccttacccttctctgatggtagacttctatttcttatttctctgtgcttgttagccaggggtggggagcagttatgctgtcctgatcaacccttagtctcagaaaatcttgatatccctgggttttgagggtggggctgtctcagagatcctgcccctctcttaccaccagaacgcctgttatggtccatgcctaggatggatgcctgccacttcccaaagggtaaaatgtttcttattttctcttcctctcagtcataatgagtttccacctgtactcaggggtcaacaaggtttgctgcccctcctgaagcatcttaagacatttgtagaggaggaggattcaggcaggacattgtgtcactccatggtagccatttcacttctatgagcctgcacccctaagggaggctttctctagcctctctttcccagtctttctcctgagctcctggtggaggtcaacggaaaggaatctgcaagtaagtgcatgcccattgtgtccctcaggatattctacacttcgtttttagcaatttacactcaattctgctcacctgtttgcatggcagccccatcttacttgtgtgctctgccacaggtgagccagtaatcatgtctcatctcccttggatttgactttttgtcccttgtatttcaggctacttgattgccctgcaatctcagttctctgatgggtttaagtaacattctgactttgtagattgttgagcttttacttcttgcgagatgtgtgtgagcaaccttcttttcagccttctgctggaagagttatatagtctatgaagtcatggcaagaattgtgactggcatgcagtcaatgctcaggaaaaacgtatgaattaaactcacaattcagaagtcgtctgttattccacaggtgggttatattgactcatgtagtttattctccaaactgagccggaggcatccttttggagcacaaatacttcagaggcttccagtgcccttaaaataaaacataaacctcattgcttacttacttggccagcgtaagtctgaacctcattactctttcctttgtgcagtgagtggtaatgagcctgatcttcttccttaaataaaacacgtttcctatttcatgcccttaagtgtgctgctccttctgtcctgaagaatgccagtatcccgcatttccaaggctagtttcctctcttctctcctcaatggcatttctgtggtgaggccttccttgaatagaacctctacgatctaatacagtacctgggatttatattcttcttcttcacactgatacatgcttttttgtgtctccagcacttcacatgcatgcttgtgactttcccatggtgaaatatgagttccatggaagcatgaattcagtttatttccctgctgtgtccctgggacatagcacttctcaggtgctcaacatatcaaaaaacaactgaatcaatggaaatctgcattaactattgttaaacaaatcccctctgctgctcatcctgaaacaccctacatggagttgcccaattgagaagcagctcaactgcaaggcacggcctgcaataaggaacgtctggggctcccactttaataaaccaacccttacatatctgtccacagtggttaagcctgcagggctcatttccccagttagcagtgacccagcctttaagtcggcttcagtctctgctgtgccataggagaggccagcaaactgtaaatggccagagagtaaatatctttggctttgaatgccatatggctacaatgtcgtaactactcatctgtgcaatgtagcacaaaaggaaccatagaccatatgcaaatgaatgaacacagctgtgttccagtgaaactttatttacaaaaacagacattaatcctatttggcccacaagctgtagtatgcagatccctgggctgctgaccagtaccggtctgaggcctgttaggaattgggccacacagcaggaggtgagtggcaggcaagtgaggattacttcctgagctccgtctcttatcagatcagcagcagcattaggttctcataggggcatgaaccctattgtgaactgcatatgcaagggatctaggttgtgcgctgcttatgagaatctgatgcctggtgatctgaggtgaaacagtttcatcctgaaaccatcctccccaaccccgtccatggaaaaattgtctccatgaaactggtccctgttgccaaaaagcttggggaccaccgctctataagatcaccacctccctccttaggtgctatctccaaaggcctgcattttttaaaatccatcacatggcttctattttaactcagactattccaaatatatttgaagctttctgaaaatgggttcagccatgtttgcgtgacaggttatcagatggaaaacacacttaatttcattatttaaatatagtttattgagttattcctacatgccaggcatggtgtggagcagtttccattcatcctgtcactcgatctcccaacagcatgatgtgtgcatcactatttccatctggcagtgaaaaaaaaaaaagtctcagtgtgttctttttttgctgtgtgttttttttttatttttattttttgatggagtttcactcttgttgcccagcttggagtgtaatggcatgatgcaacctccacctcccaggttcaagcaattctcctgcctcagcctctggagtagctgggattacaggcatgcaccaccacgcccagctaattttgtatttttagcagagacggggtttctccatgttggtcaggctggtcttgaactcccgacctctggtgatccacccgcctcggcctcccaaagtgctgggattagaggcgtgagccaccacgcccaacatcagtgtgttcttgtggttagttatggtgttcagagagagtggatcatgtgagatcacagttggttctttacatttacaaatactggctggcactgagctggttcctcaacacgtgctaaatgagtttctactgagtctaactgaagcggacgtttacactttgacatcaacgttgcagttctctatcattcagaacagatgcatctctgcagctgccaactctggagcctgtgcttatccaatcttcctgctccatgagaccccagagtgagtctactcataggatgaaaaagcactctgtaaggaccctggcctgaggaatgtctatccaaggagaggctcttattttcattcaaaagataattgcgtggagacattgacttaaccaacactggggttgagccaaacagttattgaatcatctgttgatccagttacaatggtaaatacgatcagcctgtgtagacaagagattagaaagatagctttttcttttccctctaaaaggagttgcacaggttactgtgagaactgtctaatttctgaatgatgtcatggggaagagtatgcatttcttccaagcaaatgccaggttaaagagtggtcaatgggtagaagccaccataggcaccatcatcattcaccatcactcatttcaggtttattgtagagctatttgagcattggttgggtgcatgatgaagttatggttgccaatattcaaggacattcaaggtgagcacccactgaggatattctagagagcactctaatgatgcatgcagagtgtatctaaactcctttgtgttcttttccttatgcaaggccataatattctattaggaccattacttcaattgcagagaaatatttctcattaaaaaatgcctgttgaatgaggacagctggcaggaagagccacctgtccaattagcagcagcccagccgtgcctctcccagatcctttggctccctgtaaccatcttgggagctttcatttatgtctataacggtgttcctcattgttttctacaaagcaaaaaatgtctggagagacagctggttcaagacatcttacctgtataaacaatatctttgctttccagtctgcggtggcattgttctgtccctggttgaatacgttatgtttgaagacattcaagttgtaaacacagagccatccatccttcagctaggcaggggtttgggtaattaacaacaatcaaagttgctgtattcagaggttggaagaagatctggaggaaagattctcactcttggtttaatttgctgatgaaaatgttggatggggaagaaagcttagtctggtcctctcatcttgcaggttgagaaatgggggctggatcaatgtaggtggcaagacaagaacttatgattcactttccttctctgagaccagcattactgcatttatgcaacacaggagaagactgaaagtttgaggggagagaatggctttccttcatttggagttcttgagaaatcagtttctgagtatgggcctactgggattttattccattcttccaacctcgccagtcttcacaaacgtttgtcccactactgcaggagtggcaaaaccttaacctgcttttgggctttacttggacagtttgtcaaagagctgtactgaatacaaaagtgctcaaaaaaacaacagtgtgtacctgggaaccctagaagccattcttccctcttctaaattagatccactggattatgaacttttggctgggttggaattgctccctatacagctctgaagacatgcctctttatcttcctgtcctaaattagaagcaggatttgagaaggcgtcttaactaagagaataaaaacattctcaaacagattcgattggagggaggagctcatactacttttaaggccactgaagaaatattcattgcatatggaactgtgttgctcttggtatttcctgaaacagttctcatttcaaacattctgccttattacccaagtaagtaaactcatacacacaaaaacgtctttcctcatgttgatttctggaatatgatccctgttactttatggagtatgaagatagtaaatccaagtcctcctcctcaagaagctttctgtctggttgaagagctctacatgcatgaaaaatgagccaaacaattcgagagatatttgtctgcagggaaggattaagggccaagtgagtggaacaggagaggactggtgggtagagtcctcaggtgcttgtccctgttgcaggttttgcatttggagaaagactgtgtgccttgtctcatgagacaagataacgtctggctcagcttggtgacagtgcattgaaggtccatgtggctttgtctgcctatacaacagtagcagtgcagatgagcttagattccttttgttttactggtatcatattgacattttatattcttattttgtactcagcgactgagcaaggcagagttcattccaaacactgcagctgaaagactaacttgcttcctagaggacaatagttaaatacattctcaacttccgagtcctcccaattgaagttttggtgcctacagtggtgcccacacttgtggctgatgcatacgtgaatccctttatctgttttcatggacagctgcgttcgtgctcacatggcgtggtcggagctcttccatcataaggatgttgggcaaaaccttctttgtgcacctgtacccacctatttaatttgctccagttaaaagagaaacagtttgagtgaaagggctagtatcatttattttagtgataaatattttaatttgttctaagacttccaaaaatcacactcatttttcacgtacatttttaaaagtatgtaaaagaaacataaacttatgaaaaaaatgttaaagagcatatatcttgttaaaacagcggttatttattaaaggtaattgtagctatttagtttggtggaaataaaactttatacaccccaaaaatatgtgggggaaaattattgaatgccttatctagctatgaattcctttgaactattgactattgaagtcctctgactatggactattgaaatacctattgatgtcttgccaggaagccactgtctcacagccataggagcaaggaaaatttgcctgatcctgctgtggtctcctcttgccttctctcatttcctccctcacgactcacagcaagtagaggtgcacacactacttgttttccaggaaaggctgaggaatgtttagggagcaaatgagtgagagaaaggtgacttcatctcctgagaaagcaaggcagaaggaaggaagtgacgctggaaacatctctgaatatgcgttctcctggaacctgagtcctgttccctaggactgactcttgcacaggagggggcagagattaattgtgctggagtgctgtagatttttggctagagagcttcctaaacacaagactctttaacacaaactgaggaggaaatgctctgcggccctggctactcaaagtgtggtccatggaccaagagcatcagcatcacttgctggattgggagaatgcaaggtcccaggctccacccaggccggttgggccagagcgcagattttaccaaggtcccagtgggatttcatatgcgcagtaaggattaggaagcacactgctgtgggtgacatgagaacacgctttgtctcctgggtgaacagtgcagtgcggactggaggtcagggtttggcttctcccacatcaatgcaaaaagtcatttattgttagcaaaaactagcaagcttttctaaggtggtattacaaaaatgtatgaatgaagctgttcttttatcaagagacgtgcacacatataggcccacagcatccagtctccttcctcctgggtctccactgccagcagcagaggcctgtgcatgcgagctcatctcaatccagactgctcagtgggagctttgaaaatgcacctgtccaggccctgcccaagaagaatgaagtcagaagatctgggaataagtttcaggcactggtacattaaaaaaatgttccctagtcattctaagagtagagaattgatgggcaaagttaggtttcaggagaaagttaactcaggggtatttgaaaagatgaggccgacttttctacaaccttcaaataaaccaaagtcacttgtaatagtgtggctttcatcagagtcctgagtaggaaccgcaattaataggcacacacatacatacatatgggtgtgtgtatgtctatgtgcacgtgtgtgtgtgtgtgtgcgcgcctgtgtgtgtaaaacctccatctccatcccaggccttaaccacccccccctctttttttttgcttcactgtaaggacacagtgcaattatgtaagttacctgagctgggccacctaaaaattcaaatattcatgaaagattgactgactgactccattcaagcattttgtaggactctattgtgcatacttggttttaaaacacatacatatttaattttctcttcacgagaatgtatttataaaaataataataagcagcatcctcagaggacagaggaaataagacagatgggaagagaagcatcagaactgtcaattggaggaaggaataccctaacgtgtctttagaactgctgattatgtgttctttgctggaatatggttaagaccttctccatggaatttataaacaccccagaccctgaggtctcatttccatgattaggcctttgtctagaacaccaccaacagcaaaatcctaggaaatactgctcatgtccagggtgtggagtaaaaatactgggtccactgccatgtagacggtgtggttcctactcaccagactatactgtggaagacaaattactttgctttattttctcttaatcctattgactctcacatcaagccaccgacacatcgagtgggtaggaaaatcagtctgcactatcagcagcctacatttacccggaactgggacccagttctgcagacattggagacgtcactgccattttggtctacccagttttggttatcaccgagccatctgttcccctggctgtgtgagtgtgtgatatctgaagggttattggcttttctaatctactggaagtgtagcataataaatctctgcagagctgggagggcctagcctgggcccctgtggctttatcccgcctctgtggtaggacctaggtccctcccatgagccacctccctcctgccatctcccagatctcggtaagccctctacctctctccttcactctatccatctctaccctctctccactttcctagaagtcactctctaggattaagctttccatctcctagaggacacctggaaaactcaggctttcagaaaaagaagatgagggctaccctcaaacagcttctgcacgtagcccttcaaaaaccctcaggccacctgaaagggtgggggatattgggagggaaaagtggaggaacaatagagtgcctggggcgtaaattaaaatctcagtgagtgaatcagctacagatttggaaaatattaatatcccctaaggcaggcatttgtctcagggttagctgcaaccaggcactcatgtaagtcagttagaggactcagaaacgagatgccttcagccctcctgcctcctgttcctccattgctcctgcacaaccctgggtgatgtggcttccttggccactgtggtattttcaccatgttaactggctccccagtgggtaaaaatggacagaaaatgagccagtgaaggacaaaaaccagtgtgtcttgaataactatccttgctattcatggtagacaggagaatccaaatagaagcaaaattcctgggagaagctaatgcaacaacttcatcaaaggattcatcactacattctagccacaggtgtgatgggccatctggacgatggctgggcactgtgctgggatagactctggcttattcatgttgtgcatgaatgtcacatgaatgttacattcagtacagttgtaaaatcccaaagggaattctgaaacaaactttttacaaagtataatgtgcacaaagcatagtgcacagaggcagagaacagtttccaagtgaactcacctatttatctggcaattttgccaataaacagaatatcaccagcatgctagatttccacagttgctcatctggtcccctgaaggaaaccattatccagctctctagtattacatattcaatactaagttcaatactgcttctgaacttagtgtaaatgcattcagacagtatttactttctctgactggcttctctcattcactgcttataagattcacccatgttgttgtgttagccgtagtttgctctttctcattaatatataatgctcccttgtgtgaatattatattatttgtttattcatcctgtgttgatgggttatctttggtttagcaccattccaagtgaagtcgatataaatatatatgcatttttttaaatagatgcatttctattgagtgtgtaactagtagtagagtgttgtgtttgggtcaattttggtagtgatactgtttgaatttgtgtcccctcccaaatctcatgtcaaattgtaatcccaagtgttggaggggaggcctggtgggaggtgactggatcatgacggcggactccccccttgctgttctcatgatagtgagtgagttctcaggagatatggttgtttaaaagtgtgcagcccctcccccttcgctctcttcctcctgctccagtcatgtaaaatgtgcctgcttcccctttgcctttcaccacgattttaagtttcctgaggcctcctcagccatgcttcctgtacagtctgcagaaccatgagccaatcaagcctcttctctttataaattaccaagtctcaggtagttctttatagcaatgcgagaatggattaatacagacacatacaaccagttttccaaagcagctatgatcatgtctactcccaccccagcgtgtgagagtttcagatattccacatcttagcccacaccaggcagccatagtcttttttacctttggccattatggtggcgtaaatagtacattgttgttgtttgaatatatattttcctgttgattaatgttgctgaacaccttttcatatatgcattgtaaaagtgaaaatattcattagttaagtacctttcctggtatttttctcatctaaatttactttttctacattttttattgaattgtagttctttatatgctcatacatgttatcagctttctgcatttcagatgtctccttccactctgtagcttatcactctcttaatggtattttttgataagcagttcttaatcttaatgaagtcaagtttatcttttttttttaaagctggggtgtgcgtatgtgtgtgtgtcctatttaaaatcctttggctcccctaaggctgtgaaatactctgttatcttctagaggcttgtgtttattttcatattcatatctctaacccaggtggatttgatttttgcatatgtgagatggatagtcaagactcaatttgttaaagttgaattcactgaggtatgatacatatacacgaagtaaaattcacctcttttacaagttcagtttgatggattttggcaaatacatgcagtcatataattataacctaacagatatttagaacagttccaccacctcaaaagcttctctgtgctccccttggtaattgattccctccctccacaccctagcccccaagtaagcactcacttgatttctccccagacataatataaatggaatcatacagtatgtagcattttgagtctagacatttgaacttagcagagtacttctgagattcatttctttggaaggctgaggcagatggatcacttgaggccaggactttgagaccagcctggccaacatggtgaaaccccgtttctactaaaaatacaaaaattagtcgggcatggtggcctgcacctgtaatcccagctactggggaggctgaggcaggggtatcccttgaacccaggaggcagaggttgcagtgagcagagatggcgccactgcacttcagcctgggcgacagagtgagactctgtctcaaataaataaataaataaataaataaataaataaataaataaacaaaaatttaaaatgagatttatttctttggattgatgagtggtgttccattgtttggatatatgacagttagtttatccctttatcggtaatgggaatgtgggttgtttccagtttggggagattataaataatgctactataaaatgatcataaaccaatctttgtgtggacataagttttgatttcttttttcttttttttttttttgataaatccagattgctggattttgtagtaggcttatgtttaacttaaaaaaaaaaatactgctgaaatgttttccaaaatgtgtctaccattttatttcccaccagcagtactcctggaagtctctcaccactgtcatttttttttttttttttttttttttttttgccactgcagttggtgtacagtggtatctcactgtggtgttaatttatatttctctaatgactgatgatgtcaagcatccatatcttttatttggtacagcatctgttcaaatattttgtacattttttcatttgctttatttttaaagctgaggcagttatttatatattctggatacatatctttcatcagatatgtgttgcaaatattttcaacccttcagtggtagaaaattttcagttttcacttttttaacagggttttgagaagagcagaagtttttaattttggcgaagttcaatctattaatgtttttgtttatggttcgggctgattcctaagaaatctgccaaatttcaaaaatagtttcccttgtattttacttgggaatttttatgcttttaggttttacacttaggcctatgttccatttcaaggtaatttttatataagctgaattttgatgtccaattgttcaagcatcatttgttgaaatccttcactatcctttctccattgaattactggtacttttgttgaaagtcagttgaccatatgattctattcaagaactctatttctgccctgttgatatatatgtctaaccttatgtcaataccacaataactttaaaaaaatcttattaagatatgttttacatgccataaaatccacctatctaaagtttagtggctttttagcatattcatattcacacaatctaatgttggaatatttttatcaccccgaaaagaaaccccataatgaataatcactccccattccaccctcccagtctctgtcaacctactactaacctactactaaactcccactaatctgtctctgtgcatctgcctattctggacatttcacatacacgaaagtgcataaaacatgatcttctgcatctggcttattgtactcagtgtattggtctcaacagtcatctattttgtcacacatgttagtacatcattcccctttgtgactgaataatattatccatttcacagttgttaggcattggagttgtgtccctctttgggctattatgaataatgctgccatgaacattcatgtaaaaattttggtgtgaatatatgtttttatatctcctgggtatgtatataggactggaattgctgggtcatatgatagctatatagttagcatcttggaaaacttccaaactgttttccaaagtggttccagtattttacattgccaccagcaatatataaaaatttggactttttcacattcctgtctacacttgttattatctgtttttttttttaaattatagccttctcggtgggtgtgaaataggtcgtattatggttctgatctgcatttccctaatgactaatgatggtagcatcttttcaggtgttggctatttgtatgtcttctttagaaaaatcagtattcaaaccccttgcccctttttaagatgcatttttgctttttattcttgaggtttaagagttctttgtatattctagatacaagttcattattaaatatataaaatgcaaatattttctcccattctgtggactgccttttcacttctttgatggtgtccttgaggcaaacttccattttgatcaagtccacttcatccagcttttgttttttgtcactagtgctttgatgccaaagaaaccattgcctaacccagtatcatgaagataaactcctacattttcttctaggagatctataattttagctcttacatttagttgtatgagtcatttcaagataattttttgcataatgtgaggcagggaacaactgctttcttttgcatatgtatatctacttttctcagcaacactggttgaaaagaccattttccttcattggttttattttctggcaccctcatcaaaaatcagttgaagatttatttttggactctccattcttttccactaatctgtatgtctatcacaacatcactgccatcatatcttaattactgtagttttgtagtaagcttttaaattgggaaatgtgagtaccccaaatttgctcttttttttcaagtttgctttgactattctaggtcggttccttgtatttcctaaatacttatagtcattgctgttgggtagagtgctatagatgtccattagctatagttggtgtaagtgtgctaaagtcttctatttctttgtcgacctttaactttgctggactacccactgaaagcgggatattaaggtctccaaatattattgttgaattgtctattttttctttcaattatgtcagcttttgctttgcttattttgaggctgtgttgctaggtacatatctgtttataattgttataacttcttcatgaatggcacttttatcatttaagatcttttttgtcctcagtatttgttttttcttaaattcttttccatctgatattaatatagctaccccagctttttttgattactgtttgaaaccaagcagtatgttcttttcactcttttgtattcaagctgtttatttctttgaacctacagcgtgtgtcttttaggcagcacatagctggatcaagtaattgtatccgttctcttaatctctgccttttgactgttgtgcctaattgacttttatataaagtaattactgataagggaggatttatgttttccattttgctatttggaaattccaaaacagaggaacaaaagacacacagattgtaggaaacaagtatctgtgtctctgcatatctgtgtctcttttgtttctctgttttgagattcctgcattttgtgtacagataccttctagtctaccttttaatccttttgctgttgttgttgtttactattttttgtgatatcttcttagtggttgacccagtgattgcaattaacatattaacatataacaatctggttcacattagtatgagttcaatttcaataatgtacaaatctttgctccaagttgctctgttctctcctcttttttgtactattattgtcatataaattaaaccttaataccttataaagccataagtacagttttataataagtgcttcatgcagttgccttttaaaacagttgggaaagattagaagcaaatgtgtatttaccctgactttcataacatctatgtaactgcatttagcaatcctttttatttcttttatagttttgagttactatctagtgacctttcatttcagctaaagagctctgcttagactatcttgcgtgaagtgtctactagtcatacatctcttcagtttactttatctgggagtatcttactactttttttggcagggggagcgatgttaagctgcatatacctttttggttgagttttttgctttcaacaccttgaagatatcatcccatgcctttggctttcatgttttctgactttcaccatcacttagcagaaatgagtgaaaaggttctctcctttttcatggtctctggggcagccttttgggcaacagtaatgagacacttctacaacctacactagcaaagtgccagaggagaataaatagggagccagaactttcacactgcatagcaggaactagactcccaccttcccgctgtcaacaaaggcctagtagagaacatggtcttctaccatctcttggtggtgacaagaaaatactgtctctctctaccctaaaagatctgtgccggagaaagacagataaaacaagaagtttaaataagatccaacgtgtcataacataatacctgtaatgcccagatttcaacagaaaatcattaattacagcaagaacaagaagatttacagttaaatgaaaaaagacaatgaatcaatgtcaacatcaagatacaagagaagttagaattatctgacaaaatattaaatcactcatggtaaaagtgcttcaatgagcaattacaaataaatttaaaacaagtggaaaaaatagagtatcagcaaaaaggaaaatggaagatttaaaggagaaccaaatgggaattttagaactgaaaagtgcagtcaacaaaattaaaaattcaatggctgaactcaacagaagaattgagaggaaaggaaatacagtcatgcagtgcataccatttcaattaacgacagaccgtatataagacgtggtcctatatgattataatggagctgaaagattcctattgcctagtgacattgtagccagtatactatcatagcataacacatcattcatgtgtttgttgtgatgccagtgtaaacaagtctgctgtgctgccatttatataaaagtctaacacatataattatgtacagtacatcatacttgataatgataattaacaactatgttactggcttatgtatttactatactctgcttttatcataatttgagagtatactctttgtacttaccaaaaaaaaagttagctataaaacagcctaaggcaggtccttcagcaggtatccagaagacccagccatccctttactgggtatataccaaaggattataaatcatgctgctataaagacacatgcacacatatgtttactgcggcactattcacaatagcaaagacttggaaccaacccaaatgtccaacaacgatagactagattaagaaaatgtggcacatatacgccatggaatactatgcagccataaaaaatgatgagttcatgtcctttgtagggacagggatgaaactggaaaccgtaattctcagcaaactatcgcaaggacaaaaaaccaaacaccgcatgttctcactcataggtgggaattgaacaataagaacacatggacacaggaaggggaacatcacactctggggactgttgtggggtggggggaggggggagggatagtattaggagatatacctaatgttaattgacgagttaatgggtgcagcacaccaacattggcacatgtatacgtatgtaacaaacctgcacattgtgcacatgtatcctagaacttaaagtataataataataaaattttaaaaaaaagaaggcattgttatcccaggagatgacagctccatgggtgttactgcccctgaaaaccttccaatgggacaagatgtgaaggcagaagacagtgatattggtgatcttgaccttgtggagacctaggctaatatgtgtgcttatgtcttagtttttaacaaagtttaaaaagtaaaaattaaaataaaataaaataaaaacaaatagaataaaagcttatagagtaaggatatttttatacagctgtacaatgtgtttgtgttattataaaagagtcaaaaagttttaaaaaaattaaaagtttataaggctaaaaagttacaataagctgtttattattgagaacataaaaataattaaaaataaatagagtgtagcctaagtgtatagtgttattataaagtctatagtagtgtacagtaatgtctgatggcttcacattatctcaccactcattcactggctcactcagagaaacttccagtcctgcaagctccattcatggtaaatgccctatacaggtgtctcatttttacaatcttttatatttactgtaccctttctatgttcagatatgtttagagacacaaataatcaccgttgtgttacaattgcctacagtattcaatacagtcacatgctgtacagcctcttgctccttgtagtctagaagcaagaggctctaccatgtggccaggtgtgtagtaggctgcgccatcttggtttgtctaagtgcattctatgatattcacataatgacacaattgcctaaggatgcatttctgagaatgaatccccatcgttaagcaacacatgactgtaataagtaaactggaagatagaaattatccaaaatgaacaacagaaataaaacagactaaaatagaacaacaacaatgaaacaggaaaaaaatgaacagggcctcccgaacctgtaggactataacaacaacaataaatctaatatcacattatcaaagtcccagaaggggagaagaaaaagggtagggctgaaaaacccttcacaactcatttttttattgcttcatatcatcaaagtttgcttatatttgcacctacatttgagagcttctgtttgttattttttcttccatttcaagtcatccacctgggatcactttactttacttcggtctgaattataatctctcttagtttgcatatgtgaaaatatatttacttttccttccttctgaaaacatactttgccctcctccatctgcttaggattgattttatttgttctggagaattttgatcatacctttcaaaatattgcctcttaccttgtctctttcctccccatctttagtatagttggaattctcagtccttccttttctccttcccctctttcatatttgccatcccttagtatttttgtgttgtattctgtttaacatactcagaattatcttccacttcaataattttcccttcacctttatttactctatttcatccaattagttattttaaaaatatgcactgtgtgcgtgcatgtgtgtgtgtatgtgtttctagaagttctatttatttcttttttatgtgaccctttttaaacgttcacttgctttacaccgtacccatattttcaaacttgcatttctttaaacatattaaacaggtttattttgtattctgaatctgataattctgatatcagaattcccgtgggcatgtttattagtcaattctcacattgctataaagaactaccagagactgggcagtttataaagaaatgagctttaattgactcacagttctgcagcctgtacaggaagcatggttagggaggcctcaggaaacttatagtcacagagggtgggtgaaggggaagcaagaaccttcctcacatggtgacaggagagagaaagagtgaagggtgaagtgccacacacttttaaagcaccggatctcgtgagaactcactatcacaagaacagcaaggagaaaatgtggccccatgatccaatcacctcccaccaggtccctctcccaacaacaggaattacaattcaacaagagatttaggtggggacacagagccaaaccatatcagcatgaatctgctattatttcttccatcttccattcatggttcattttctcaattgccacttgtgatgtttgattgcaagttttaatatttttggaactgcatcttttcattattatctgagctttaaattaacgatgattcctttaaaaaggacctgggcatgctcctgtggcaacacagggagcaccaccctgcactacttgacattaaattatcagcttgaggttactttgggtgatcaaaagtgtgaaattgggctacaaatctgcttgaagtctggcttgtaataatgtgttatcaggagagatatgtttcctgcactctgccctaagtaaattatcctcccccaggggagagtagcaatagtgggaagaagtcagctggaggagggtggggacaggcttactcttagtgaaagtatatcctgatgttgagcatgcagcccgttagctgcagccatatgtaggagtctttcattggctttctttgcaggggagaatcctgctccttgattcctacccccttaaccatttgccctatgaagccacagaaactgaactcctagccaccgtcaccagatttgccaatgccctcgagagaaatggctttagtgatgctctgttccactcccttgatttccacttccactgaagtttgtacttatcagttgtttttctgttgctttttattgttttttctttatttacagaccaaagaatatataatttaaagatttaaaaagtatgtaattctgcaccgttcaaaaagatgttcattcactgtatctattcaccttgcagttgcaaatgtgagctctggcctttctctgtccctcacatacaccaagctcatcccccatcccccattcaggctcatgggacactccttgtccaattcctgtatgcctgatgatacctggtcttacatgtctcagctcacatcctcctttctcagagcagtctttctgacctattaaaaactaaccatgacatcggaaagcctattttcctgttttttttccccttatccatagcatttctcgttgtccgaaattaacttgtggagatatgttacagcctctttttgtgtgtcttcagccactagaatcaaaactctacaagagcagggaacttgtgccttttattgactgcttttgtggtgccaaagcatatgccagctgtcaatatgtgtttgctgaatgaatgaatgaaaggatgaataactgagactctgggaggacttaagaactcttgatggaaggaagccatactctctcctatgtctcattccatgtttgctttcatctggggaaatttaaatgttcagctggtgaaatataagaatcggtctctgtgcattctcacaggcatgcttgttcattttcttctctacttccactgtgcacatttcacattggtggaacattatgaataacccacgctgacagttgatgacttcagctcaccttctattgccctgcttctggccctaatagctacacatatagaaccttagggccagaaagtgcctttgggtcttctaggttgcaaattcttttgaacacctattgatgagctgcaccatttctccagaaaagaaaatgtgggtgtggcatgcgctgtaataataaaatacctttctggtgaaattgacccgatccaaactggcttcaatacaaagcaattgttggggtcaatatctgaaatgtctgtggaagagctggcttcaggggcaactttaacttcatggggttacaatcccactttacccccagccacagcagttcttttcacagtgtggcccttggccgtatcagggccttcccatataattctaggaggtagctccagtctccttccactgacactcagttttagcccagcaggcaagagcaagtctcttctagtaatgctcctaaattcctgtcattcactgggattggactggctgaggcctgcgtcactgcggaaccaaccattataacgtgggattctgcctggctcacatccagccatccctgcagtgcgggggtgcccagaactcaggagaaagccacacccacaactcacacacatggtgggggagtaaaagttaggttgaagatttttcatgtaaatacaattcagagacaaagatattcaaaagcatttgatacaagcaagggagcctggtgactagaagaaactggagaaacagaactgaactcgtccccacggtcagagattaaaacctggctgggggatggtggttatctcaggatataaaacttaagggggttgggagttgtttattcaacaaagatgtgttgagcaggtcgcccatgccagtcacagtgtcaggatgctggggtgagttctggaccatccatttcagtgaggaacagagacaatgtgaatccatatctaaatgagatcatttcaggccaattaagtgtattaaaggcattaagagagggtgttacagagaatggcagaggtgatggggagcttctttaactggagtagtcaaggagggtttcttagaggaggtggcatttgagcagtgcctgagtgagcaggacgaacccaggtaaagtgtagagggcagagagttccaactaacggcagcagatgagtccagaagcctgatccaggatacgtttagtgtgtctgagaactgaaggaatacctgtactggctagagtgcagcaggcgggacagagggggcatggcccaatcttgcatatggatggattacactgaggagtctgggttttgctcccaatgctacatggagccattgtagtattttaattaagcagggggtttatgttttcaaatgatctatcgagaaacaatgtatagcttgaactggagagaaacaaattggaatctgggccacaggtgaggagatgggcagaggtggacacttgtttgaaaaagctgaagatggagctgccaggacgtgccattgggtgggatatgagcagtggcggagagagaggcttttggcttaagcaactggtggatggtgtgtttttactgagatggaggacttgtggggcgaatctggaagcatgctagtctaggagggaggagtcagtagaatccattaccttccaagaaattgccaggacaggagatgacccacaagccaagccagcagagacagcactgagacgggtggagtgagtcttgtcggttaatgcagcgtcaacattccgtattcggcttcaacttcgcaatacattcgttcattttaaagggacattttaaccctgagttaccacttgatcaggtttggatctctctagagaaaagctgggcatcttttctggacacttctcagctctctcttgttgtaagaactaagtagccaaactctccctgactgggactgcaaagatgtaaatgccgcagccgtgagactcacctccatcaggccgaagctttgggagcctggaggctggagcaaggccatgcaaggcgtcctctgaacctgtgattctaacatgctctgggaacagattcaagggacatgtccaggcctctctgcaagggaatggcagggtgagctaattcagaggcacctctgccacccccatggatggctctattgacagagccaaagattttttggacaaaagtgaaagaaactcactcaaagtagttgaagaaataaaagggtgtatttattgaaaagatgaaggagaatcttaccaaagccaaggacagggtgtgccctggacaagggcagggtgggagcaagcgagatgttctgctgacaagaaggtcccacggtttctggtcaattttgctggaagtcctgctccatgtctctgtccctgtctcttcatctctccatcccttgctgtgagtctgagtgcttatctctgtccttttgtggtttgagtgtgtcagggggtgcacacctaccaccatttctctggatgcctccataggtgtttctgttcctctgcttcagtgttcatctcctgtctccttctcctcctttctctatgctctctttccacgtaactggtgacggctgagccaacatggcagcctctggcctaagaagtaaaattatttccaggttaagccccttgcagaggctaactccaacctgattggacgagtgagagtcagtcatccacagtggtccaatcagcaattgctaatgggagggccgatgccatcctcccatgattgcaaggggcaggcctgtgtttggaacgggaaggaattcctcgtagacgggatggttgtgagcgggacagaaactccaccacaagggttctgggggtactacagggactaaaggaagcagtgtgatcagtgtgaaagcagcaaggccatgatttatttcttgggcgtgtagttttctcccgaggcctctgcttggttattttacccagcatcggtgccaaaggagatttccccaaagggaaaagtactgcagtgctcgacgcattacagtcctttcccgtttgcaagctctcccacacattccttcttctgttcccaaatcacaggagacgacgagaaagagaacagaccacctgtccagataatttgcctttggagtctgcagggctggtgaaggcatcctgagatgggggaggcccctggggacctccacagtcagggctcccacctcctctcccacaccgctctgcctcatgccctgggttgcctgtctgactgtctcaagactgggggttctccggtgagcagatggctgcttagcgtaagtagaacaacatatttttaaaataatatttaacagaagggaagaaggaggccttaccgcagtcaaaccacccttcctagcttgaatccaatgcatcctcccatagtgtaaaggccgcccccacactctctcgtgacaaccgtggggtgtgaggtgcggggtatgttgcttaattcaaagacaggaaagcagcttgggtgcatctttagaagcgtgagcacccccagtatccactctcggtatttctccagatcctccttcgtcaggcacctttccctgcctgtccatttacttttattattaaattttccatcattctactctttggaccctttcctttatatggtcttttattctctctaagtttgaggcttattcttcagctactaagttccttacacatgatattatttatttctcactctgcgtgtcagcccctcctctcccgcattcagaatctttccccgttgacttctttgtcactccaggctctaggtagaggaagtggctgaatttccaaatgaattgtttccatgataaaaagggaggacctctccacacattttgcatttctgttcacatttttttaaaacaaagaagaaagaaaataaagacaactcaccaaatttcagccacttacttaatttgtgttttctttaagcaaatcacattcatattctaaaataagtgatgtcaaaaagagattatataccattaccttaagtggcaaagcagttagtatccctttgccatgaggagaaagtaaatgtaaaactaaatacagtggacaagagctattgatacgatgaaatcccagctccatgaggtgacttgaagaagcctctgagcctgaagcccctaggctcctggttaaaaggaagaattatccagtgctaaaaagtaatggaagcctcacagacaccaggctggaactttcttcttgtaatcgcagtcctttctctgtgtgattgatttgatatttcacacctcgtctgtgtacagggaaggccttctctggcttgtcttctccctctgagaccagctgggaaccgaccctgaatcatggatgtttgttgctggaaaggtcttcagctgccccctaatcccttcatttcacactcggagtaactagggctcagagaggttaagtgtctttttggcggtctcacagcttgttagtgttggaggccgcttgcaggtgaggagcgggtttctcaaccctgacttccccatgtgcaaatgacaatggcttaggcttcaggagtgtagggactctttggggcaccatgttagcgtctcatttttcaaaaggctagactttcagtgctgtctgtcattttcagcaaaggtgagagctgcatttgcataaaaccaggtctccgattctgcattttgacccacaggggcaagactgagcctccatctggaggtgcagctaccactaggctccagtttcaaggttttctgagatttcctgagcgcttccaaccagtttatcatctcatttaatgaggaagaaggaacaattcaaaactatcacatccccattattcaaagtctctctagcctggactggtgcagctcaggaccctagtaacctgatgatattggatatgaaaaccccagcaatttgtaaactgtcaagcttaataaaaggtctttgtgctaatgggattgtattgactcgagcattatcagaagaagaggttgatggaatgctaggacgaaacgaagacatgacacacattttgggtgcatctcccaggccctgtaaatttgggtattgaattggaagcgtagcagttcattggccatgaccacagctcaccgtggccacgcccagctctgctcactgtgcacagcaaggagaaatttgagatttgttgtcccgatacaggcaggaagcatgagcgtgtacggtgtgtgttcttcccacacccgtgtccctggacccttgccaggtcccctttctctcctattccctcccacgtgaagcaccagtggccagctctattttgcgccagatgcagacccaatgctatgaggacactctgctcagcgaaaggtcgctcagggctcaggaggccacgtgtaggagccagtaaaaagggcgaatgtgcatttgccttcctccttctccttttcaaacagctccctaaccacccagcaggcctggctctgctttcacacaggaaaagtccattctggctttccaaggccctcaggcagccacagccctacgtggcctcattccagcaggaagtgtcaaaggaattctgccctgggacatctcacttctttcctgataatgggccagcactgtccttcctcccctttgcaggtctgaggggcagacaccatgccgtggtgacagcgtgatcccttgatggaaaggccaccagaaccactggtagtgcagctggacactgcggagccctgggaccacacccgctgcctccctccagactccttaggtgaataaatgaagctcacttgggtgaagacttttgattaacgaagcaagattcttgttgctcatagtcccaagcatagcaagctgagatgctgtgcagacctcagaccagcgcaaccatccacgtggcatgtgctgtcttcatggctcacatctcagctgtggctcacatcttcatggctcacatctcgtggccccacaacttgtgccgtcgtgttgcacatgagtgctgagttgagcaaatagcatcttctgcctcagtggtccctgtcccccagtgagacatggctgtgctttgtttcccactcaccattggttttggacctagaaatcagtttctgaaatgccacatcctggtgcagatgggtaaaaacatgcacaggaaaatcaagctactgaaggtctgagtacacctggcaacgtgcacagatttcgctgtccctctgggcccatctcctccaataggacaaggagagcctcccacacctgatgctggggcgtggcctttggacagcaccttcctggtctctaggattgagagtccatgtatcagtcaggcaggaagatggggtcagaaggctgtggcaacttgagagagatctgccaggtttctgtgaagatggctctgctggctccacatttaggaaggacaggatgggaagggcctctgtgaaaaacagaactggacagactcacggtttcctagtggagtttgcagtgttgatgagaactaagaaccggctcaacagttccctctcttaaaaactttcttttcttactaatatttcagaaatgttggtaccaaaaagcctataatttcatcagaaaatattaagaaatgttaacaacatgtaagtcaggagagagagctatctttccatatgaaagctctccgtgagggacagtaagaacactgatctcttccagtttcttcttgtatatgtcacacattaagcctcatggggccccaggtggcagcaagactcctgacaacagggtaaagatcctcacctcttgttggttggcccagagtcttaacaatgttggttaaaaaatgtagggttaggccgggtgcagtggctcatgcctataatcccagcactttgggaggccaaggcaggcagattacaaggtcaggagatcaagaccaccctgttcaacatggtgaaacccccgtctctaataaaataaaaaaattagctgggagtggtggcgcgtgcctgtaatcccagctactcgggaggctgaagcaggggaatcacttgaacccaggaggtggaggttgcagtgagctgggattgtgccactgcactccagcctggcaacagagcaagattctgtctcaaaaaaaaaaaaaatgtagagtttagaaattaatttgtattatagaaagagttttcattgtgtgtggatttgaccaaggattaaattctgtaccccttttcatatcacaggtctatgccgtgtgcctggctttttccaaccactccgaattgatcatttcctaatgaccacatggctcagaaactcacagcacatccttctaggggcctctttctcccaagtcctcccagggacttggcagcttcatctctaaggcctgcagaggctgtggctatggctgtccattgttctcgctccttggcttcagttcagagccatcaaatccctgcagctcgcacactggaacattcatattttggataaggtaagttgaaaaataatttactaaaagtcagtgcatcatctttgtaacatttttcagcatcttgacaaaagtgagaagtcattctcaatgataaagatagttttgccagttaatttttccccaagattctaaaaatattatttattatttaggaaactggttaataaacactaattctggtgaaagaaaatgcatgctgctacataattcattaaatcccagtggctctctgcacaccccgccattcagaaatgtttacatgctgagcaaacgattttcagtgtatagaaatgaattgtggctggagattgcaggactctgatcaccaaactttccagccaccttttttttttttttttttgagacggagtcttgctctgtcgcccaggctggagtgcagcggcacaatctcggctcattgcaagctccacctccgtggttcacaccattctcctgcctcagactcctgagtagctgggactataggcgcccgccaccacgcccagctaatttttttgtatttttagtagagacggggtttcactgtgttcgccaggatggtctcaatttcctgacctcgtgatccgcccgcctcggcctcccaaagtgctgggattacaggcgtgagctaccgcgcccggccctttccagccccctcttaccttatcattggttttatattcaaatgtcaccctgggagtggcacagggagggagggagcccacagcatgggaagcttcaagagatcctggcatttggagaaggtgggtgagcctggagttcacctggagagatttttactttcttccacttctagaaacactgcccatttttttttttggtgggttttgttgtgttttggtatttttttaagcagtcaacaaaacagcttctagaaaatggaaaacccagagtgtgatctaccaggagctcctggtttcaaccagttccttgctgtacctgctgggcctgtgatacgaagaaacatcatggcttcaatggcagccttggaaatgaacttcattgaaagggaatttacactgaggtttatgattgctgctatgaaaagagtgcacatcctttccttcgaaacacaagtaagtaagagccacatgttactgtgacagggcagtattttagggataaagaaaaattagaactattttagtcttcactagcatatacacacaaacacacacatatagtttcaccattgatggaataatatgcagcagataaaatgaataaattagagctaaatacgtctaaattcataaatctcaaaaacataacggtatagtggtgagtgaaagtaacatgttttggaagggtatatgaaacatgatcaaattacaattttttaaaaacacaggataatactatgtatcattactggtcacatgcatgtgtagtagaaatatgaaaacatgaatcaaaggatatcaccaaatttgagaggtggaaagtagaatgggcacagatctgagacgttttccataaagaattattttctctctgtaccattctatttctttaaaaatatctgaagggaaatgaaaaaaaattagtatttgctaagttgtggtttcaggtccatgggtctttttgacattctccatacttttctttatattaatctttcatataatcaatggggcaaatttttgtctaagaaaaaagggatccaattgacttttatttaactctttggaataaaaatacgaagccaggtcaacctgtaagaatgtgaatcaattcccatctcagattcctcatcacaaaggcctaaagatcatgggagtggggaaaaggttgcacaaaaggacacgatttgttcacttcatacaagtgtcctttgaaaatagaagcacaagtaaaatcttttttaaaagaatttttttgttttaatttcaactactttttcagtgctgtgaatgttccatatgaaatgcttttcatggtagaaatttctttttttattgtatatatttatggtaaacatgacgttttgagatatacatatatgtaaatatatgtgtatatatatctcactagatatatgttactatacatttaatgaaattattatcatggtgaagcaaattaacaaagccatcatctcttatagttacttgtgtgtgtaagagacaggtaagagcatctaaaatctattctcttaccaaatttccagtaaaacacgatattattaactgcagtcatcatgctggatattagagatctagacttattcatcatatatgactgcaactttgtacccatgacctacatcttcccattttccccccatcctaactctggtaaccatcattttactttctgtttctatgtatttgactttttttagactccacttataactgagtttcctgcaatattttttctttttgtgcctggcttatttcagttggcataatgtcctacagtttcacctatgttgtcgcaaatggcaggatcttcttttctaaggctgaatagtattccattacacacacacacgcacacacacacagcaatttatccatttacttaggttgttttcatatcttggctattgtccatgatgctgctgtgagcatgggagcacagataccttcatatggtgctgatttcattgcctctggatgcatatctcgaggagggattgctggaccgtaaggtatttagctctagttttaattttttgaggaaactccatactgttttccatgatgtctgcatcaatttacattcccaccaacagtggatggtggctccttttctccagaccatcaccaacactcatcatttcttgtctttttgataataggcattcgaacagttgtgaggtgatatcttattgtagttttgatttgcatgtctctgatgttttctgatgtttctctgatgttgagcacctttttgtaagcctgtaggccgctcgtatgtattctttggagaaatgtctatataggtctgttgctcacttttaaggaggttttggggttttttggtattaagttgtagcagttccttatacaatttggatagcaactcctcatcagatagatggctcacaaatattttctcacaatctgtaacctgcctttaattttgttgattgtttcctttgttgtgaagaagcttttaagtttgatatagtcccatctgtttatttttgttttttgttagtactgtaagtgctagcaaggacagacaagaaaaagaaatataaggaaactaaattggaaaggaagaagtaaaattatctctatttgcagatgacttcattctatatgtagaaaaccctaaagaccacccacacccacacacaagtgtgtatgcacgtgcatatgcatgtgcatgcacacacacacagatacacacccacacaccgctgttagaaataagaagtgaattcagtaatattgcaggatacaaaatcaacatacaaaaatcaattgcatttttttacattaataatgacctatctgaaaagaaaatcgagaaagtaatcccatttatgataacatcagaaagcataaaatacttagaaataaatttaaccaaggaagtgaaatatttgtacactgagaactataaaacatcgatgaaataaattgaagaagacacgaataaataaacagatgtccagtgttaatggactggaagaattcatatagttaaaatgtccatactacccaaagcaatctacagatttaatgcaatccttatcaaaattttctttacaggactagaaaaaaaaaactctaaaattcatacggaaccacagaagaccctgaatagccaaagcaagcttgagaaaaaagatttaaaagaaaagctggagacatcacagctcttaggtcaaattatactacaaaactatggtaatcaaaacactaaggtactggcataaaaacaaatacgtagacaaatggaacaaaacagatagcccagaaataagcccaaccatacatggtcaactagttttccacaaaggcaccaaagaatcataatgaggaaaggatggcctctccaataaatgaccttgagaaaactgtatatccacatgctaaaaaaagaaaaaaaaaaaaaaaaaggaaattggacccttctcttccaacatgcacaaaaatcaactcaagatggactaaagacctaaatgtaacacctgaaaccataaaagtcctaaaggaaaacacacaagaaaaactctatgacattggccttggcagtgatgttttggatatttcaagttaactcgtcattcactgactccacataaaatccatccctcaaatattctcagaacctatcaccaagactgtgatcacttctttgggatgctttaaagttaattaggaaaaataaaactgggttttacctttgaaaaactttctaactgtactgatgtgctcaaatagatggacacatgaatgaaaaatccagaatttattctttccatgtggtctaggtccctccatatgtttctctggattttgccattcactgaatgcacacgaacactgaatttactctctattgctgtgtaacaagttattgtaaaatgtattggcttaaaacaacaaataccatttttgcagcttctgtggatcaggaatcatgaagcagcttagtcgggtatttcaggctcagggcctctcatgaggttgcactgtagatgtgagccaaggctgccgtcatctgaagactggactagggatggaagctctgcatttgggatcatactcatggctgtggcccggaggcctcattttttcacccttgggcctctccgtggggctgctgccaacagggcctccctagaaggaatgacccaagaagaagaaagaaagaccaagctagaaaccaccgtgtctttcataacccaatatcaggaatgaagaagcacctcttctgtgttcttttggtctcgcagaccaaccctggtaccatgtggaaggaaattacacaagagtgtgactatcaggaattgaggatcactggggcacctggaggctggagtctacaggtactttatggcgagtcatggcgatggtgaggaagcagctactttcatcacaggtaaaaactgatacacaaaacacacaaacagagaggagccctatatttctgcttctccttcagggtgaatagcagccaccattcaccctaccagagagatgttctttatttttttattgctggctggatcttaggcaaaataagcctctcctgtttccccagttgaggacaattgagaaaggcttatgtttgccaaagaatatctcatgctagcaacaaaacttttaaggaaataattacagaaagcacacaacaccctacagtgagcagaacgcagctccttccctccacccacctccccactacagagaatgatccagcccaatgccaaaagcactgaagccgggaaccctgactgagatctcagcttcaatgctccttcctcagagacctttctgtccctgacctttctgaggagtataccctctttttatgggccctcaaaaccccctccctgtggcatttgttttagttaacaattctacacttatgcatgtgaatttgtgattagcatccatctcccccatcacagttatgagggcgagagctagtttcctccctgttgtgcagggcacatagcacaacgcctggccccgtagtcaggctcactaaatatttgctgaaagtagaaatgaataaacaggactgtagcttctaggggcttctgtgggagccagtatcgccattcatacctggggattatgggatattttcaacaaaaacatgcactttgcacaaagtgaaagtcagagcctggagcctgtgcaaacggtgccttgagcagctctacggcgagtgtgaggatgcagtcaggggtccttcagcaggagccggggcatcctgcagaacacagggccgggatcttcagatgtgcagcagggagggggcttggcacagccccatgagtttgagaagcttgaggcattaaggtgagtttcttgtggtgcagcgcgccagcagtgaagggaagtggttctctctcccctcatgcacagacacgcacaatgtccaggatccaggcagagaagcttcatcaaagttgtctgtgttttgccgcagccgaataaaagctgtaggcttttctaagaagggttataaaagggagcagccgtgaagcccgtggacaagtcatcaattacagcaattacagtagcaccataaccttcccaggcttgctggagggaggttgctgtggccacaggaggtgcaccgcggattacaggactaaaggccttctctgcttcttcacagtgatccatctctgcccagcacccaagtactgagttaacctacaacgtggttcagaattaaaacataaaatgccagggccctcccccagttagcagtattggttggaaacatgtttagcagtgagtaacagaagtcccaagaaataatggctaaaacaaacaagagtatgtgtcttcacatagtaaggtatcaagaggtggctgtcactttaagttcactttctcatggatgccatcaaacaccaggtttattcaaccttcatgcactgccatcaccttcccatccacggactcttccgacatctgctgaacgtcatcacaagggggctgccatagctccacccgttgtatcagcattcagggaaggaggacagtgccaacaatatgtctgctcatttttttaagagaggaaaagactctcctggaagtccacggcagcattatgcttacttcttacttgccagaactttgtcatatggtcagactttaaagcagagaggtaagaaaataaataatccatcttcaagtctctatagtggatggcatcagaaaagggggcagggatgcctgttttataagtcatctcacgttttctgctgcgtcagccaacttaataattaatctacattgccccccatttacattttttgcaaagcaaaaatggcagacttacaccagaaccctaagggtaccatgacaccatgcaggctttcattcattccttcatgcttccattcccttattcattcattcatatcacaaatatgtgttggtggcctcctgtatttcaggcctttgctgtcagtggaatacagcaacacacaagacagacacagttgccttcccgctgaggctggacgtctacaaagaaactctggacagctatttgccaaggcgatgggcactacagatgagacgcacaaatgatatgactcatgggtgacgctgggcaaacctcggtggttgagtcctgttgggttttctcataggaggtgagttggaagcggagacctacaagtaggtcagataggatggtgtgaaaagagccccacccagcctacagggaccacatgtagggataaagaaaggagcaggataatttccaaggactagaatcccagcttggttggagttcagagcctgagagcagaattttctccaggacaaggcagaaggaacttgcgggaagcttcccctatcacccctgctccccacacctgtagagattaaatgaagatatctgtttcttaagcacctgtacccccaccacagcctctggaatgtgataggcatgtatttgatgaatgaatgaatgaatgaatgaatttcactcagctgactctctctaaattccagcttccagtctgcctcttctgttgcacagaaagctttgagaacccaggctaggtttaccagttgtttcttctgagtctaacacaaaagacatgcttattaatagctgtggaattgatttgaattacatgcaaactccctcagaaaaagacccatgtctaactgatctttgtacccttcatccttgtacttcaaagacttgcacatatgcgtcttccatgcacattgggttggggaggtggtgaaaaagaatgaaggaagccacactcaacccggtttccacactctctccttcgctccttagcagccactgggtgcataggaaagggcggtcttgttctcccctaaagcccctgaagcccatgtttatttatagccagatttctgacacagacagacccctctgaagaaccattaaaatgagttctaagtaatgaacatcataccatgtagcagagacatcccccactacttcaaatttcctgccaaaacatgccaatacactggaagccaatttattctaaattaccaaactatgcacttgcagttaatgaaaaggctatttctgaagatgtgtgcgtgcacactgatatattcagaagcaaatgacacccgtgctggtggatacacgttggtatttcacacaacctcatttaaaacctgcaagggactcagcctagattaactgcagacttcggcagtcatgagggatatgactaaaagccctttgagagaggaaatcctcttaataatattgctctgccctgctgggaagagacagggtgagccggcacctgcccatctctcttgtcttgccctctcctctgcctcactctgacagtggaggggctgcaggttgtgtcaggtggtgggctctgtaaggtcgacaagcaacctggaaatttaggtggctgtcttagacctatttctctctatctaggtgggccagactcagcctctgttcttcctgagcctgggtttctcttctgaaagcccacagctaggtcagcagggccagcctgggcatcaagtggagaccacagaaggagccaagcacacacaggccacagccaagctcagcctagccctggggctggaaccctgagtcctgttccgtggacagcatcttcccagccccctccttccccagacccagttggcatcgttggcatccaaactccacttcctgatcccaggccctcagtgccttcctcacacacacacacagacacatacacatacaccctctctcacacacacaccctcattcaaacatgcatacacacacacctatacacacattcacacacacacacctgtatgcacgcacatatacacacattcacacacacaggtatgcacatacacacacgtacacacattcacacacacctatatatacattcacacttacatgcacactcacacctatatacatccacacacatccctatacatatattcacacacacttatacacacattcacacactcatgcacactcacacctatacacatccacacacacccctatacatacattcacacacacctatacacacattcccacgctcacacactcctatgcacacattcacacacttacacaaacacacctatacactcatttgcacttactgtcacacacacctatacacacattcacacacgcttgcacactatctcacacacctatacacacattcacacactgtcacacacacactcacatacactccccttaacgtaggcaacactgtccactacctccgctcttcagcagaggcaaatccaggttttgtgggacctaaaactcataatacaacttttggagccttctttaaaaagaaaaacaggcttaaaaataaatgctaatttaaaattggaaaataagtcacaataaattatggtagcccttggagttcaggttctttcttctaagattcgttgggccttgctatcatgaatatgagtcccgattgcattctggctttccctccccagccaggacgttctatggctcccagcagctccagccctcagaagtcaccggccctgaggcttcagctttgttagcctccaggtaaatcccactctgtgattccttccctgaaagtggaccttggtggagctgaacctccccagatgacattgggccacgcactgcaaggagaacaccattctctggaggacgtattcctcacacacgcacacacacacatgcatcagagtgcggtcgggcctccagatctggtttcctgctaaccagtttgcaggaaatacaggggatacagaaaccatgtcacatgacaccatggggttttactctgcaaaatccagaatgcaggaaactaccggacaaatggcccagattcctcaataaataaacatcaggagctgaagtggggagaagggaggatgcaacagatgaaaagagatgggagaaagagcagccaaatgcactatggacgttttaggatcccagtgcaaaccaattaaatataaatacatagacattgaccagtaggacgttttagcatttaatgaatatttgattttggaacttattaacagtgttaggtatgaaattgttgttagattgtgttaagaaaaagaggcttaatttttcagaggtgtggactgaaaaatttggggtgaaatataatgatatgagggacttgtttttaaataacccagtggaggaggtggcaggagaaagggaagggaaagaggagctaaagatgattccagatcggccacatgttagtgttgacacggggtgatggacacaggaggctttattgtgttattgtgtctgtttgaaaacttccatagtaaaaataaataaccccaaagtgagtgctatagcctcagtttccccaaaagcaggggtggagacgaaggcatgcagagagcagtactgagtgataagggatggaaccagggacgtgggcacaaggccactgccgtgaccacagctccctcctaggtcccagtgaaccttgtttgggacctaactaaatgcatttcacaacattttgctgaggagtctaaggggagaaacactgattgttcagctgcctacctgctcaagggcggctccctgagtgttgtctcccagcacttctagctcacacctggtgaacacccaggtctgtgcaggcatggcacacggccatgaaacaagaggcacactagtgacgaaggttcagaagctgctccaaacctgagagcagctggtcactgcagcagggttggaataagacacactgcagaggaggtatgcagatgtgcacagtagtggtgccagagagaggctggagacgagggctccaaacacagagtgatgcagggaagtggaacgggaatccggttctgctacacagacatgggtgcggggaagtggatcgggattagagctctttggttacaagtaacacaatcagactgtggctaaactacatgaaaaagaaaattaaaaccgagagaatcagaggaacagtgaaaactcaggagtggtcagggaccagagctgttctggtcgtctagtggtggaaacctctggccagactcctcagagtatcttcacaggataggcctgcactaatcattctccatcctgggccattctgtgctagactcaccactctagggcccaaagtatgggttgtgggatgcagaaattggctgggaaaggcaggccaagggctcatttgtcagaagaaaaactgggtgctgtaaatagaggaaaggtagtggttttgtcgggcagtgtgcagcataagcccggtgcgttctaacagcattgttagcacagatgaacccccacttgatacagttagaggaagggatacttttcaataatggaccttcaggctcccctgttttattttttattttttgaatttataagctattagaggaaagtttaaaaagcaatataatagaaacccatatcaccaagattaaaggagaaaatgccatcattttaccattctaatgaaacaggatagaaagctaaaccccgatttctggtttctctcccctaacactctctctaaaaataatcacttctgaaatccttgttcatccttccttggattattagactaacaacatatgtatgcatccattaacaatatccacatttcttgtgtgtttttaatattacttgcgtacaacaatattctttcttttgcaagatactttttgcatttagaatgcatttgatacatattattgatacatgttgatattattttcactgctgcacagtgtcttgctgtaaataaacccactatttatttttccgtgacatttctgaaagtcaactttcttcttccttttttttttttactttgctacttcaaaaggtgcttccaggaacattcttgtgcaagaccgtgtgagagtatctccaagatagacaagtggaagtgaaattctgggccatagtggatgaacacttgccaagaggtgttgacaaattagtcttaaatgaacctgtactgcattttaaggcctgggagctcttagtggccccatcctttccaaagcttgtgtggttggccgagtaatgtcttccaagatgtccaattcccaatccctggaacttctgaatgctagcctgtatgacaaaagagactctgaagctgggattaagttaagaatcttgagtggggagattatcctggataatccaaatgggtccttataagaaagaggcatgagatcagagaaccagaaggtgatgtgaggatggaatctaagagagagttgaggatgctgtggctgctggctttgaaggtgcaggaagggccatgagccaaggaatgtgagaaatggagctggagttgccagaaaaggcaagaacagggaatcttcctgagaggctgcagaaggagccagctgtgcaacaccttgactttagcccagcgagactgttttccaacttctgagctccaaaactgtaagagaacaaattcggtttgttttaagctactaaatttacagcaatttgttactgcaacaataggaatctaatacagcttggtattgtccttattatttttctgccagcctggtagaaaatgatatgctaatgttttggtttgcattttcatccttaccagaccaagcatttttgtatcatatgttcattgcatatttaggttttctactctagagagttcttgttaaaatagttttgccagatttttctccccttattatttcaaaaattattatttttttctgaatattctggatatcaaactttatccctgatacatattccagatactctctcccaatttgtgaaactgagtttaatcattcaaatattttaaattttgttgtattcaaatttatcacttttttcttgagaaattctttactatcccaataagttaaagatattattctatattttctttttaaacatttgccttccactgtaggactttaatccatctggaatatatttttgtatatggtgttatgtagggatctaaatatatctttttccatatgtctagccaattgtctctgcaccggttattacagtccatcctttcccattgacttgagatactgcttctctcatgcacaaatcctctacagctgttgggatttctactgaggttaatcctgcttctttctcacagttgtcttacccatctttggtcctttactctgttatatgacttttagaatcagctgtcaagctctgttaacttctgagattttgtttaggattgcattaaatctgtgctttatctggggagatttcccaccttcctggtattactttgcttgctcttcttttcagtctctttggctggtttccttcttatctccatgtcttgccctcagtgcctgagcaggtcccagggctccttagttggaacaacaatcttctctctctatgcataatcaccagagcaaggttcacagattccagcatgtttcacatcacatagatggcttgttaaacacggattgtaggaccccatccctgaagcttctaattcagtaggttggaggttaggcccaagaatttgtctaacaaatcaatgctgctattcctgggaccaccctttgagaagagctgttcacggagccttttttaaaaataccatctatatactgataaagttttatgctcagcctaaacttcatccaccttcctctgaactccaaaattccatgtacaactaacaatgtagtaactttaataatcacctgagactttatagattccagacctaactcctcattcccttcctcctacaccacactccatatacagttgatcagcaaatcctactggctgtactttcaaatgtatccagaatttgttctcagttctcaccacctccaccatgactgccacttggattatagcaataacctcaaacttgtattatggtttccaccatggtgctctttcaatttattgacacacagaagctgtgtgagccatttaaagcctaagttagataatctcactcccttgcttaagaattatccaaagattcccatcctactagtgataaaagtcaaacttcttacagtatccagcagagcgctgcctgactgcacctgcctaattctcttgcctcaaattccaccattcccaccacacacacccacactccccactccacccatactgagataccagtttgtcatctctcagcacaccaagcatgcaccttctctgggcattggtgtcattttttcccctggctgaaataacttactccaatatcctcctggctcatgccctcacttcctgctcaaatatcacattatcaggattcattatccctaaattttgtataaaaaacagaaatcccctccactctctcatttctcatctccctcactttgctttattttttctccatatgatttattaacatcaggtatactatgcataatgttatacgctccattaagtatgaaattcattcacagaataccacctgacctgtgaaaattgctgaattttatttgtcaaattaattaaaagattaagtcttttgttcatgaacatggtacacctcatcatctagttgaaacttattttatgtccttactaaccttttattattttctctctaaaggacttctttgtctttcattagttttatttttagctacttctacagtttttaatgttgtgaatatctttttaaaatatgccatggtctaattgtattctttattgttaggaatacaactaatttttcatcattgttcttgtacctgtctgccttgtttaacttttttattagttcccatagattttctgtcaatttttaaagttttctgtagacaatcacaccatctacaattaatggtattccagtcctttagtttttattccttttccttgtttttctgcattactagggcatccagagtcatgatgaataatgtgataatcagcctccttcgatttcaatatggaaattaaccccaagatcccaaatcaacctgactgcatattagaatcatgttggggaacttaaaataatgctgatggctgagccccatccacacagatacttaatgagacggggcattaatgtggtttaatatttccctaggcaattcttattcatagctagaattaagaatctcttccctagattatagagattgtacccctcctccctttcttacacctagatgtcacatagcataggtatgcaaactgccttttcgttctctctgtttcttattgcacttggggaatttgtttcctttcttgcataatcaattgtacatttaaaagcacatttgtcatatttaatataccatttcttgattttgtaggtaacgggatgtaaaggtatctatgccatcagatgttccaaatcaaaaatctcttcacagacttcgttgcatactgtgtctcatgacaggcaaaactctgggctgctgtcttcttaagcaattatcaaaaccagttgagacacttgctactctcacagcagtgtctctcaaactcccctgcacactacagtaacccagagaagttttaaaaatccctatgccaaggcattatggcccataccattttaattagaatccctaattgtggggactaagtataatcatttttcaagctttctaggtggtaccagtgagtggacaagtttgagaaccagaggtatacagcattctggcagcctcactcaaacagaatctccaggggtggcacggggcatcatcatgttttacaagcatgtcaggtgaacatcatacatgcaaagagtgaggtggtctctgagcttctctggaccaccatctccttgccaaattatgagaacaagaatcagcattgcagagataatgccctctcattacagcttaaccaggctaggtcgtttcttggtcgtttgattgaacaactggaaaatcattctttttttgtgcattggttcattcattcgttcttttattcatcaaacttttattgagctcctactatgtcataacctgctcccttattttttttcagagaattttcctcacctaagaatggttgagttattaatttgttggcttcttttaatctgaagcctccatattcatagcagaatataaaactggttcaatttcaagccaaattgggttttcaaataaagagagtaaaaatgtgtcaggaacccattcccctgttttgtgtggtgatgccttctgagttttaatccaacagatgatgttttctgtggatcttgctacctgtacatggaggcaagataaaagataaatggtcctcatacatagagaaacagccctcaggcaacagagaaaagggcactttgatatgcaccacttcctcttgtacacaactactccaagcatctattttcactgactactttcctggagtctggcatttccaaaggggaacacaagcattcactttgtcctcgcatattcgacaagatgtctagaaattcacgcctactgccccttactggagcaccatagaactatggcattccacagctggcaggtgatcatctcatgcacactctcccactgtgaagggagaaggagctgaatctcagagaggaaagcagatgtgccattttcacataatcatcagtggcagagctgagatgtagccaggatggcccactcatcccttccaccccactgtcagtcaaatattgaggacagcgtcagtgctaccagccaggcaattcatgcaattcctacccactccttccagttcagataaatgtggtgaaaaggcaaataaaacctggctaagcccatccaaaaaggacttaatatgtgagctgtaaagctgtaaattgtgtacaaaaagactcacttactatcattcatagtttttcagacatggtccagggcagcttaatttacagagtgcttaaaggccaaaagttttgttttaagatggggaactcatcacacatgtttaccttccttcatttcccaatttttaaagaaaatatatgttgttttctaaataggaaaatatctacatcagagaagggtgcaacccacttatctgaaatgtcaagaaatttacgaaggatatagggcaagaaagagaggatgccctggatgagtcaccaaaagagattgaaacacctaatggagaaataagggatgggaccacatgcagcagctaggagcagcaggggttcagaaagggcaggcagccctgaggccagacaccgagtgtggggaagcacacccaaaaagaggatttcatagctggctgggaccctgggagcaccttctctccactctccagcctatagacacagaagccaccttcgaggatccagggagcatcccacctgcaggatgcatttttccccaagctcatcacatcctccacagtagcaatcctaaggcggacccataacaagggtttctgacaatagaaatatggttcctcaacgtgactggcacccaatgaggtcccaccttgtacccagctctatctgggcatgagggagcagagaaccaaaaaccacaggctccacctgaaggtgctcatggcccagctaaagagatggagcagggcaaggaattgcagtgcaggaattggtatgggggacaccttaggaagctgccgaggggacacccagctgcatgtgaaggcgtccgggaagcttttcactggaggcgtcttgaagaaagatgtgaggggtaatttaggtgttaaccagagttaggggcagctgtcagaggaagcggagccgtaggccgagtgactttccaggtagggcagtcaattttgacattcccagtgcactctgagcacggggaaaggcaaaagagcaatcacataacccgggagaaaacaccctgagaaattgccccataaattcagggatctacatgtggcatcgtcctcattttattctttacttggctcactttatcactagaaaatccaatgaggacttttatgaagacacacacataattaatggggataactcattaatttacaagccagctaatcgataagcaggttaatctacttaggcatctgaagaattaccgtgtagctctctatttacactgctatttagtctcgttccacttcatcagctttttggtggctattaaactgacagtgctggtcaccacatagaaaagctgatggattaatttctgctaacatgatattcttctggtatatgaatagcatattaatggcccacaaccagatgatggcatttcccatcaggagaaaaatatatttcgtgcatttcaaaatttcaaatcaatctttcttttactctacccatctatttaattttccggcttgatttttttttttaatgtttcaaacaaaaagtgaaagcgaaaactttggttttgttaaaaatagttatatacttcagagagtatttaggcttttgggttcaaaaagaaaaaaaaataaagcaacaaaatgggatttggtgtctagagctccctgtatgttggagtgattttaggtcagacctaaactcaagtgccagtggaaatcagaccaacagtgaaatgaatgcactgggcctattggtggctaaccggccggcacttagcttctctcaggaaggccacctttacatggcttgtagctgttgctttgtgaaaatccgttgcagcttgtaaagattttcagtttttcaagagaagccaaacatcgggttttggcaactctatcagacagttcttagttgcaggtaacagaatccagtggagctgatttaagcagaaatgaattgattattggaccttgggtagcatatagcatttccaggaagaccagggaatcaagcctggataccatgcagccaaggcaatgccatcacaggaacccctcagccatactatggagtgtgccaacacctgctgccctagcaagtcacagccctcaggacactagggaccacaaccactgctgagcatcccagggcctttccgctcttgctggcctccccatgccagctctctcctcactctctcccgccctccaggacgtggagattgtctgcttgctggcatcaaggtcaacttcagctagcaccgaggtcacctgcagcaccagctacaaaagagtctggcaaatgtagattttaccttccaggctctgtcttgctgaagagctggtttgaaagaggttaaagttgacttgagtaagccaacatccagcatttgtctcaacaactgacaagcaaaattaaggctgtgcaattgaaacaatattgctctttgggctacaatgactcaatgggtcagcagtgtcctgcctgttcagtaataatttgcaagcagagatcttatttcccgtattcccttgtggcacagcacctcccacgccaaagcaaaccaaagcaaaggagcccttgatgaggaggggccttcccccaacctggtctcccacaggtcctacatacgtacccaccccagacacacagagctgcttcctgctctcacaccagactgagctgtgcccagacatttcccctagcactaaccaactctttcaaaaatacatttttctctaaaaagaacaagtttaaacaaagttgactcattttaagaactgtttagaagataaccttgtgtttattaattatgtatttgcagaaattggaggcagaaggttaccaacattgcctggtgtccagccaggaggtagagcgtggtggcatccagaaccttcctccaactcctgcctggcgtggtttttattcatctttgtattcccaagaaacttctcagtgtctcaggagtgttaggcactcagtacgtgtttggtagttacatgaatgaatgcataatgactaagtgagttaatggatgaagctaattgtctctcccttttgcttttccagagctttccaaggtgaaagtgttggacactctttcttcatctcagatttaatcaactaagaatgctgcaaattgaacaccagtccacaaaactcaggaatacatgaaaagcattgtgccttatttttaactaactcaaattctatgtcagtctcccttttatgctggatgttggcgctaaatctcagtgggttcctcattctgccagacctgtgtccagtttgggggcttcacatagagccaccccatcacaggagagggaagggtcttgctcttggttgccatcactccaccctcttgtcttccgagctttgatgttcactttccttttcaccactcggaagcttcctgccatgatacattgagacctcaatgttaatgccaattggggtttggggttctcataaactcagaagtccaggaaaatcgcctgctgcctcccacaacactctgagggcattctggaatcctaccacttacctggagcctgctggcctcaactgttttgaagtctgtgtctgggccatgcaggtaaatgggaggatgttctgtggccataaaaatacccgaagtcccacctaaagttgatgcagggtcttctgcatttcattgcaaaattgttctatcatttctatagttttcagcctacagtcaggggccaggactttgcacccttggtaaacctcaatctcttctccttcctggcttctactcctttctccctcaatcccaaatcaaggcccttgattgtctggaggtaggaaagcctggttctggctcatgatatagtctacatcatagcctttgtcatctcatggattcactcaacaaccgtgtgtggatggggccacccaatatgtgccaggagttgaggacacgcagggttatgatgatgaaatagataaggggcccacactcacggaccctgcaggacagtggagctgtggacccagcatgcgagtaaagacccagtgagctcaccagacagatcatttaaatcaggtgataggacagtgaagggcgggggctgcattagttttggtggcaagagaaggattatcttctgagaggatccacaaagtaaagagggccggtatgactgggtagagtgaggaccgtggttgaggcagaagatggagctctttattgagctctagggagcccgtcggatgggacctacggggcttgagggagcccatcggatgggacctacggggcttgagggagcccatcggatgggacctacggggcttgagggagcccatcggatgggacctacggggcttgagggagcccataggatgggacctacggggcttggcggacttaattttaaatgtggaagaagccattgcagagcctgaacctgaggtgtggcatggttcgagttacttcaaaccaaatttattgaaatctctttgcataaaatgcaatgcgtagatcttaagagtatagttcaatgagatttgataaatgtatgcaccagtgtaacaactcctccagtcaagataaagaaacgtccctcactatttcctcatgccccttcatagtcaatatctgatccactcagcctaggcaaccattgatctgcttttatcaccatagatatttgggtatgagtctttgtatgatcagctatttttatgttgcttgggtaaatatttaggaatagaactgctgaggccaaggatagaatatttaacttgattgccgactgtttttcccaagtggttgtaccacgttctgcctccaccagcatgtgtgagtttccagggcttcttgtccttgccagataccaggtggttgcatgccgtgtcccagtggctgttgggaatcacagtagctgggcccaagatgactctggaggactttacatttgcgcccatctgtgggtcctcctatgccagtgtttcccaaagcatgggccatgcgcattattctttccaaaatgatgtcatatggtgcataggaatgtcatggaatacaatggaatcactctggaaggaacttttcccttctcaggtgttgtttgaatattcctgatgtgatcgaggagattaactgctacttaacatctctgcaccgcttgctaaactccttgttaaaattatgctttttattttgaaggagttctagattcacatgcgttgtaagaaataacagagagattgcatgtactcttcacccagtttctcccaatggtaacatcttgcgaaactatggtgcaaaatcaaaaccaaatctctttttataacaaagagagggttcccacctcaagctcagatccttccctgtgtagctagaacttagtaacagtgttttattttattatattcagtttcaagggttacattctatttataacaaatgatactggttttccctttacaataatgataaaattttattactgagtaaattgatttatgtttaaaaattgagttattttaaagaatatattatataaatgattgtgctagctgtatgaaaatgaaagtgaatgatacataattgaatttcaggaaacactgaaaacactgaagctacactatcaaatggaatgctttccagaccctactttttctacattgaacaactactatgaatctgatacatcatgaataaacccatcaattcactgcatttatgcacgcaatcgatatttattgagggccttatgaatgtaacgatttttctgggccttgaggatgacacaaagatgaaacaaatcagacagatatcctaaattcaaataatgcatagccttgcagggagacattcattcactccatgaatatttatgagcacctggcaggtggcaggtgtattctaaaaatgaggaggaagcagcagaggccagtggagtgcagctgtttgggggttcacatgtcactggtaagacagacaaagagcaggattcatggcattttctatgaagatgacaaaacttcatggaaaagtaaatgcttggggaggagacatggggaggccttgttgtacaggcaggtcagggatggtctagctgaggaggaggcaccagagctgaggctgacataagagaaggagccaaacatgcaaagaagcagtgggaaagtgctccaggcacagcaacagcaaatgccaaggctgtgagctgggcatgaaacgggtataattattacacagtagctctaattcaggaaggaggaagggccaagtgtctggaagatgcagagtttggaatatggaagggaacaggcaaagctggaaacagtctgagcccataaaggctgcacatcagctctgtagccatcggtggagctgaaagagacaggacaaaggctcataggaaaggcaggacctgtcctgagcttgaacaacagagacgaccttgagaaacctatttgcaaaatgcttcaagcataaatgccatttcctactataactttccatagtagcaggttgaattgaatcccccaaaatattacattcaaatcctaacccccagtatctatgaatgtgcctttatttggaaacaatctctttgtagatgtcatcaagttaagataacatcatacaggattagggtgggccctaaatccaatgatgtccttttaaaaagctggacacagaaacacagagaggagaatgccagtctaaagtggaggcagagcttggagggatatgcctacaataaaacaagaaacaccaaggatttctggagccaagaaagaggaatggaacagattctccctcaaagccctcggaaggaaccaaccctgccaactcttgacttccaacttctggcctcaagaactgaaataacacatttctgtggttttagtcccccaagctgtggcaactatcttcagcagccccaggacgctaacatagctctgcttccctttgcagagctgggcagggattctgccacctgagggtttggcatccaattcttctgtgagatatttactcttagtgccttaggcgccaattattgtctttgattaatttcagggcctcaaattgtgaacccctcagtttttctaacaatgcccctcctaaccccagtcaaggccagcagtgttgaagggttcattgggaggggacctgcactggctgtttggactatcagctccaccagtgcctactgtggcctgtgctttcttagcacatttttaaagaaataagctattgaacttgttgaaataataaaacaacccaggaatcacctgatccaaataaacaaacaccaattaactgccactgtggtgggcagattctaggatggtccaaatgctacagccttctgaaattcacatcctggagtgatctcttcacaagtgtgggatggacctagtgactggctcctaatgagcagaatatggtagaagggataagacgctgcttctgagattgggtcataaaaaggctgtggcttttgccttgggcactctctcctggccacatcctaaggcagtctcacagacaggctcacttggtcaggaatggtggcctccctacagacacatgaatgagcttgcaaacagaccccagtcagccttgaggtaactgcaggcccagtaacacctgggtgcagcctggtgagagaccccaagctggaaccacctagctcagccatacccagattcccagcccatagaaactacaagataataaatgtttgttgttttcagccactaggttgttggaataatcagctattcagcaatagatacccagcgtcctcactgtggggctgcagagtgctttgaataccaaaatgtttattaaagaggaaaattatcttggatgagcatagatcagataaggtcagattagggtgctgtacttcattcattcattcagttaggtacacttcattcattcattcagttagccagtcagccacactcattcctttattcatgctgctatgtgccaagtattgtcctgggcactggagataatgaaaataaaaacagcccctgtccataatgacatcatagtctaatgaagatgacagggcatatttaaataattgcttttgtgagataaatgctaacatatgttcagtcactttttcaaccaacagacattttctgagtgcttgccattgtgccaaccttgtgctaaatgctgggcttcataccatgggcaagactggcctgggtccttttctcgtggaggccatggtctgcgtaggaggcacttcaccctccaagtacacacagggaaagaataactgctctgtctggtcttaagggagggcttccaaaacgaagttcttgaaggaagccttgaaaaaagagtaggaagtactcttgttccagtagttctggcagaagaatgggaaggaaattccaaggaacagaatgtgtgttacttggaagcatgtgacaatgtggtgtgtctgtgtctgcagtccagcaaggagttcgacctcgctgaatactttgcctctgataccacaaagaagggtgcttctggatgtttactgcagcaagacttgcaaccctggacactaagctaccacctgaatgttcgtgggtgcctgttgtctactcaggatccacaccatgggcaccactgtccccaaggagggaaggtagagccctcccagggttctcagcctcagtattactgactcactctgttgatagcctgtcctgtgcagtgtaggatgtttagcaacatccctggcctctgcccactagatgccagtagctccccctcccacattgtgacaaccaacattttccctgggtatcaccaaatgtcccctgggtgggggcaaaattgctcccaggtgataatcactgctctttagaaccaacatattattaaaagaccagagaaagacatgatcttaattcctaattctatgtaaaaaaaaaagaaaagtgaatgtatgtgcatgcccatagctataggaattgatggctaaggtctatggagcacactcttatgctccccaaggttaaagaatttccatgaggagacagtggtgtgacagagacactcaaaggagggtttagcctctttcactcagtgtactctgcaatgattaaattgattataataagaatgtttccatgttatcagttgtttaaagaagttcaaatatgccctactcttatggccaaaggtatttgtaaacatgtcaaaaatggctatggaaggtcttggcagcaaagacaggaaaagttagaaagtatatgtgagttccctgagacggaagggagaaaaacaacgccaaactgaagataagtgtatcagttattgcctacatgccaggaataccatatgagagtttaagaagttaaaataggccgggcgtggtggctcacacctgtaatcccagcactttgggaggccaaggcgggcggatcacgaggtcaggagattgagaccatcctggctaacatggtgaaaccccgtctctactaaaaatacaaaaaattagccaggcatggtaggaggcacctgtagtcccagctactcgggaggctgaggtcggagaatggcatgcacctgggaggcggagcttgcagtgagccgagatcatgccactgcactccagcctgggcaacagagcaagactccatcccaaaaaaaaaaaaaaaaaaaaaaaaaaaaaaaaaaaagaagatgttaaaatagtagtaaatgcataaatcagaaaagcaggataagaaattaccttgggaaagatatgttgttattttccaaatgtgtttaagagattgttcactgcaaagcagaaatgcagtgaaaaaaaagagaaataagctaattttaagtcatccacgataaattacaaagggaaagatcaaggttcagacctaggacaggtttcaaggccagcatctgtctctaactcacttgcctctggtgcggccatcctgtctgtctggactttctctctaaatgaagagcttgtcactctgtctctaaggaaccttcctagagccctgatattgaatgagtctgagtccatggcaaccaatcctccatctaaacctggagtctcagtgcaatttagaaaaggcctgttcctgtccttggaggagtttgtccaaaccaagattagacaattggagttagagcaaagggctcaaagtacaaacaggaacaacaggacatttacatgcagtcccagaaaagctaagaatcaaagttgcccaggaggccaaagcctttcctacccaccttgctcttctctcccatggacagcacctttacgagctgtgacccagagtttgcagctgaaaccaattttgaaaccccaaactaagcctcgtcttcttgctcttgtattcatgctttcttcttcttggaacttacttcccttgttgaacttctagagaagtgatggtatggcagcttgagtttggtgtcagagcgtgcacacgtgtgtggcggaagtgtgcaggtgcctgtgagcaattagcttcagttccacagttgggaacgccagtgggtggcacaggtgtggagctgctttccattcctgcctggccatcctgggtgtgcctggactgtgcaagctctgatgacctgactcttaccctggagtaagacaggtctgctcctagctggacccatgggaggggcccaacagccaccttgtgagacagctacagctctggacacaggctcagtcccagcagctgctctttacccacacacagacacacaaacacacagaacacacacacggaaacaacatacaaacatgtagaatacacataggcatagcatacaaacatacatatacacagacacaacatacaaacctacagagcatgctcagaaacaagacacagagacccaaatacaaacacagacacgcaaacacacagaacacacacacaacatacaaacaagtagaacacataggcacagcatacaaacatacagatacacagacacaacatagaaacacacagagcatgcacagaaacaacacacagagacccaaatacaaacacagacacacaaacacacagaacacacacacaaacagcatacaaacatgtagaaggtgcaaagacacaatatacacacagaacatgcacagaaacaacacacagagatacaaatacaaacacagacacacaaacacacagaacacacagaaacaacatgcaaacacgtagaatacacataggcacagcatacaaacatacagatacacacacaacatacaaacacacagagcatgcacagaaacaatacacagaaacacaacacacaatacacatagcgtgcacagatgatgcaacacacacacacacggatacaacatagaaacacacctgtgccctgtgcttgctgcctcactgcctggaacgcgcttccccgggtctttggatgctggtctcctcttatcagttagatttcagcttcaatgcttcccctcaaaacccaatgtttccctaactgcaggccccctaacacccccaccatactccagcgcagtctctgttccagtctcttacccactgcacccctctcggacacaacagtagccgtcacagctgctccttccttcacagctgtttcctggcagcccaggacacaggcccttcccatcagacttgaggttcttgttcacacccatatatgtagtaggtggtccataagtatttgttgaatggatgaataaataaaatgggaaaaatttttagtgtatcaattctgctcagtattgtactggaaaatacctaccgaacaatttggaggattctttagaagatgttagaaaaccattccgctataaaagcaaaaggccaactgcactgaagtccgaatcttaactttaaacctgtcattcttgctggtgcctctttcttcaaccagaacactctacttgacactcatctacttaattgaaaagcattcaggcccctgcgttattagcatttgttgctagtataatctccttctacaccaacacgaaatttgtatcaaatcctgacagcaggtgaggtgagaaaagtttcttattgaacggcttgaccacaagcctgtagagaattgtagaatcttgaaagcaataaatcaaaacagcaatcaggttctgcacactctaacgacagcagtaacaacaatgataaaacagcccggtgtactgagtactcactgtggacaggcacggtgcaaagccatttgtgttatgaattcacttaatctcgttcctaagtccatgaataactgcactccacagatgaggaagtccaagcgctgaacttttaagcgatgtcccggatgccgcagtcaggaagacgtacacctgacatccaacccagcagcccagccccagagcctctccagatgtcatgccgtgaaatgcttcagtgacttctggactggtacaaaggaaggtacactgaatattcggagagagcaatcgttgcataaaaagctgggcagctatttttattgccaaaacacctggatgaaaaggggaaaaaagagacatggggactgccatctggacacactactgatgtttatcatgacctccatattctgtgcagatgtgtctggctaatggatgtcgtggagacacagctctcaaaaagaaagacaggggagcctctacctcctcatctggatccacaaaacagccccagtgtgatgagtgcaccaatgctggccaccctatgagcactgtcaggagcagctgtggggctaccctgagatgtcacttacaacatttaaggtggctcttagctttctaagttgaaaatgaattaaactttctcagttttctagacattttattacaagaagagttttggaaaaatcatgtgtgggggttgaaatttggtttgaaagaaattaaaagtgtatgtataggagtttaacgagaaatcaattattctaaccaagaaactttgagtcctgacatgtctcagcatcgccaattgttatgtgatatttttacagacatggaatctaaaggctggaaggagtttgaacatcaagctattcatctacaaagatcaaactgatttcttctgacttttcactaaggtgtcgctgaaataagatttatcaggctatcagttttgttatttctgaaaggcattgcaaaacatccttcgaggatctgaattaattttgcaataatgagatcatatcagactatatatctgatattttagataacactggccagtgcttttggttatgttgtcatttttggctagatagtaacatgtattagcaaggccaaaatgtgaatacatttcacaaaaacacacattcttagccctgctcctctaacttggaataattttcatctcagtgagatattggctaggactttgattccaaaacaagtaaaattgaagcctatttctcttttcccctctgttctttattttttttctttgctggaaaatctgtttacatcttttttttcttttttgaaacacttttcccaagagatctcaattactactaagaaattttaactcagtttcagagctgaagaaactgtcaacacaaaaaaagattttaatgatcacctggttgcatttaacattcacaaaaaaaaagtcccttgtttgggaaactcacaataattgaaaatatacagtttttaaattatgcatgtgcttctgacactggtgctgtaaggataaaaagcatccactgaagcacatttttttactacaccgaactggaaacatcgtaattctaggcaatcacagaacagttgtgtagttcacacgcagaagcagctgtgctcatgctcagcccttggagctgttcccccaccacggggaggagctcaggaacattgagtgcgacctcaagatgaaggacgggactttggctgcattctgtggagagccacgctgggggaggtcacatcctcctccttatccaccaaacatccttccagcaagaccaggaaaagtcaggagaccactcaaaaaaggatgaaaaaccatctcaaacaatgtcagcaagacaggaccactgtgaaattttcaaaaacgacttgtgatcccaactcctggctgaaacccccgccctggtcacggctctgcgctcatcctccatgagtctgtggctgtcatctataaagtgggcacagcagtcaattcgccggcctgtaatgatgcctgaggttaggtacactgagatatttgtaaagcatccccaaatagtcatattcaagttattataactattaataataataaataattgttattgcttttattcacattcattgacgtttcccgtgccaggcattgtgctaagcattttatctggaatctctcattcattcccctggggccctaagaggcctctgatttcagtcctacagacttaaaaacggggagttaagggcagctgggtgggcagggatgatctgccagctcaccttcccaaccagctgctgggtgctgtgagcaggcaaccttcagtcatcaccctcttccagggctgcctcacaagcagagagcttcctcactcacacaccttctggggcagcccaactaaagaggaatggatgcagaggcataaaggcattgccttctcagccccatgccctgtaataggctgcttcagctccagagctcccgtgcggtcagctgggactgctggtcaggccaccgcagtatgatgacgaagaccctcctcaacctcctcctcctcttccctcttccacctcctcctcctccctcctccttcctcctccccttcttcttttctcccttcctcattccccctccttttctcccttcctcctctcccttcctcctccccttcctttccccctcctcctcctcctttctccccttcctactcctttcttctttccttccaccaccctcttccctcctcctctaccccttcctcttccccctcctcctcttcatccccctctccctcctcctctgtcctcttctcccccacctccctcttcttacctccaccccctctttaggtatagatcccaagggatctatatatattatatatatatgttatatatattttgatattatgtcattattacaaaattaattcagatccttggaggatgttttgaaatgccttccagaaataacaaaactgacagactgataaatcttatttcagtggcaggcaccttagtgaaaagtcagaagaaatcagttggatctttgtggttgaatagttcaaccctaatagtcatcctgctccatgccaaacccctctctgtatcctctcctccggaatgcagctggtcacagtgtttaggaaacttgacaaagctcacagagcgagtgagtgatggccccgagatccacacccacatctccctgaccttcatattttttcttcctcccttctccgcctttccctccctaaaacttttggaaaaatcatagctcatcttcacatctgtcatacttgtgacaactgttcaggctttctccaagtctaaaattatagaattctttgaaagaaagtattcacgcaatcaaacttcaccaaattaggagaccgtcagtgttaattagcaaaaattccagattataaaatgcctctagatgtatgttctttttttttttttttttgagcaaatatgtcaagcttgtatagcaactaaaggaaagaactaaaaatagaagtcttttttgttctgcaatctgatgaccacagtaaccttaaaaacaatttgttcttctacagaactcaacatatattttctacagtcaccccttattcacaattcatctgctgaacaatctttaacaaggaaaaaggaacctccctcctgacccacgtctgaatgttcacaaattatcatgttgccagaatcagaattaagtgattctccttcatttgccatttttcccttattttcaggttcttctttcctccacattaaaaaaaacccactttttgtgatatgtcgatatgtctacccatcacctcgtcttttcaaagccctggagatccccagtcactctgggaaaagaagaagccccttattaatctgagctattttagtgacaacaagcctgaatgttttaagatagacaccatcagatccaacataatgctgtcagtttttcacgttcaaacacttcatcttcagaatatcatctgcatgccttagggaaaagcccatatactcctggaggtataaaccctaccctctgggaggtgctttacccaggaagaagcctgaattctccagtcagctttctgacctcctcagccttctctcacagcacagccttgcacacagttccagcttcggccacgctctgctaattgatctcttttctgtatttgttttttgatgagatgagtagaaatggcaattcactgtaacagtagtaagttttttaaatcaataaggaatcccgctgtgtgctaatttggaataaataacaaagcaaatgggacatgatctcggctcccagagaacctgcagtgaggcagaggaaaacggaccaaggcctgcccttgctgggacttgtctgagcatcttctgagtgtctcagcagtagcattcactggttctgtgcagtgggtgccctttgatgcccactgtatggggtaaggagtgaattacacctgcattgcaaatgactccaatacaaaacccatagtagataactctgtgaattattagtgagtgaacaaatgagggaatgaatacgggaaacagtttttcacaatggcaagagcataagtttgaaatggaccagcccacacctgactaggttgctgtgaacttgagcggcatgattcattctgagcctcagtttcccttcattcatgcagcaggaactttgtccctcagagttgttataggaaacctatatgatgatgtacaaatgtttattgagtgctggctgtgatccagggtctgaagtaggaactgggagcacagaagtccctgtcttcatagggtttaattttcccattcagtggaacaaagcagataataaatgagccaagttcagtgggacatagtagatgctcaagaaatgagccacattggaggccaactcaggagttatggtggaaagctttttgtgacttagggcatgaagttcaagttcaaattgaacttcaaaactgggcagcatgaatatcagtggcaagagcttgctgggtggaaggagcatggtgaaaggcagaaggtagctggaacatttagggtgctgtccagatgtaaggggtgatggaaaataaagtcagggagttgtcactggtcagctgtggaggcctgatcccctggggcgtaatttcatccactactggaggcactgaggagcctaaaggggttcaccgagtagggacattacagaagccactttaaggagatgacgcaagaacccgccctcagcctggcttgaaggtagggcagactgcagaccacattctacataagaacgcctttgaattagatctctttgtgttgcaagtgacggaaaacacagcttaccccggcttatggaaagacatcaagtattggctgatgctatcgacagcatccaggtgttccaacgatgccagtcggaatccatctttcctcatctttcagcctcgtttccctcagcatgacttcactttcagatatcgtcacaggacagatggcagcagctccacgatgtcatccccagagctcagcaagccccaggagagagtggcttaaaccatggctccaactggaacctccagtgaggcccgtgtggcccaactcagctaagcccatggccaagaggacaccgtggtccagtgggtaagagcttgagtcaggcatcctccttctgagctgggtgtggaggaaacttcatctgcttcatagactgagaatatggaatggtgcaacagagtacagaaggggcattactacagcaggaaagggcattactggtgtgtccggagtttattccatctggtgggttcgtggtctcactgacttcaagaatggagccgcagaccttcgcagtgacttacagctcttaaagacaggatggacccagagagtgagcgatagcaaggtttattgtgaagagcgacagaacaaagcttccacagcgtggaaggggacggactgggtggctgctgctggctggggtggccagcttttattcctttatttgtcccctcccatgtcctgtttctgtcctatcagaatgcccttttctcaatcctccccatgattggttagttttagaatcctgctgatcggtccattttaccgagcactgatttgtccattttacaaacctcttgctagctacagagcactgattggtgcgtttttacaaagtgctgattggtgcattttaaaatctccttgtaagacagaaaagttctccaagtccccactcaacccaggaagtccagctggcttcacctctcactgggagtctggaaacagtgctgttaggatgttactcactgagagtacagaaggggcattactgaagtaggaaagggcattactgggagtctggaaacagtactgctggtgttactcacagagtacagaaggggcattactgaagcaggaaagggtgtcactgggagtctaaaaacagtgctgttaggatgttactgagagtatagaaggggtgttactgaagcaggaaagggtgttattgggagtctggaaacagtggtgttaggatgttactcactgagagtacagaatggggcattactgaagcaggaaacggcgttactgggagtctggaaacagtgctgttaggatgttactcactgagagtgtgtaaggtgttattgagagcatgaaatcatgaaatggtgactgcagaaggggtttcactgcaagtctagagacggcattcctgagagtatgtaaaggtgcttctgagagtaaagaaggggtgttgctgaaggtctgaaagtgttactgagagtacaggagggacattgttgaaagcatggagggtgctactgagcataccccttctgcagtcgcctttccatgatttcatactctcaataataccttactcactctcagtgagtgacatcctagcaccactgtttccagactcccagtaaagccctttcctgctgcagcaatgccccctctgtactctcagagagtaacatcctagcagcactgtttctagactcccagtaatgccctttcctgcttcagtagcgccccttctgtactctctgttgcaccattccgtattctcagtctgtggatcagatgaagtttcctccacacccagctcagaaggtggacacctgactcagtccctgcagatactaaatgtatgtttttggggaaagtgacagtagtacttaattctatcagacagatcctccttccatacattctcccattgatgatcttcccaacagcctaccgccatctgcattttagaggaaactgacctgtccgacatcatgtctcctttagcaggtggagctgggactcaaacctaggtctttgcagtgcaggccacaccctttccctgcctctaggggataacaaatacaagaaattctccccatgaaagaacaaattcatccattcctgcatctcctctataacatatatggaataagtggatatattagcctcctattggcactataacaaaccacaaacttagtggcttccagcaacatgcatttattgtcttacagttctggaggtcaaaagttcaagatgggtctcattgagctcaaaatcaaggtgtcatcagggttgcatgtcttctggaggctccagggaagaactctccttttctttcctttttccgttcctttccttccttccctttcctttttcttttcctttattcctttcccttttccttttcttcattctcctctcccctcctcctcccctccccttccttctcctctcctcccctcctgccctccccttccttctcatctcctctcctcccctctcctctcctctcctctcctctcctctcctctcctctcctctccttttctatccccttttcccagattctgaaggctgcctgcatttgtcagcctgtggctccttccatctcaaagccagggatggccggggaagctttgcccacactgcgtcactctgacacgaccctcctgcctccctctgttaaggatccttatgattgcatcatgttgcctccacctggacagtctaggagactccccatcttcagatccttaccttactcacatctacaaagtcccttttgccgtgcaaggagaaatattcagaggttttgagaatagaacatctttaggggacggtttttctgcctgccacagagggcaactggtctactgtgcacgtcagggaaatgagcctccccttactgtgttagagtaaaactcagtcccatcccggtttggaattctcatgtggacaatgatgaggatgcatcagaaaaagcccgtgttgggaaggaacccacaccttccctgccactgctcaacaaatgtcaaggattacggattgaatcacgctcatgggctcatgtccagcaacacgcaacctcccctgtgtgatgccactgttgtactgtggccaggccctcactctttggccagagcaggtgggaagccagcctgcatgagggacccagcttcctccagccttcagcatctgatgcaacttgagcacattgtaggtccctcctgactccttggaactccatttctttatcagtcccgatgataaagagcattgctaaagggtaagaacattctggtttaatttttcatgagggcaaacataaaaaattcaagctaatacaacccaaagtgagcattcagggcaccaacaaaccctgacacctgcctctcaaacaaactccactgcttcctgagtccaccccaaaattgcttcagccctaattggagccaagactgcgctgggcagccaacccagggccgccgggggcaaggcatgcacatcccccgcacaggggctcacgggtccaggcgtttgtttatcagaaggtcactcctaatgtttttaattttaattttttatgtttttcttcattaaaaatttaaaaactttgtattaggggttgcattaaagaaattcagaagagtaaggaacagccccatcctgcctggagagctcagcgctgtctgtggcgtttgtctctggctgagggtctggctggctggggaggtacagttctatttcaccctgctcaatgctgccacgatgctgggtcagcccctgctatggacagggaagggtgggctgctctgtgtgtttccttcatcacccatcttgcagaatgaattttttctgatatttcttctcagagagcccctgtccttctctgctgccacaagacctaagaggctggggccagcacaatcacactctgtagaccaaaggctcacaggaccctcagctgggaggcaaggggcttgtgtcagtctcaaggccagtcaagatgttggttctacatgaacaggctaaactgatgacaaaccagtaggatttgggaaggacggtctttgagatgcattcatggagaaaagggcacagcatactagtgtctcaaaatcagaactccctgggaaggcaacctaaggcaggccttagaacagcggggtcgggccacatccggcgacagccccacaacaacattcgcactgcttatccttcggcgaagggatctgtagacttttgtcagtgcattctctcattcattgagcaaatagccacagaccattgcttcaggtcatgccctgtgcttggctttcggggcacaataataaggtcacagccccattccatcaagactcccagcccctcacatggatgattcagaacacgatggacagaagggtttccatgatgcagcagcgtctcactcaggggagaggtggcttcccaggggagatgatgtggaggcagaaacctgaggatggatgcaggacaaacagtggacagaagactgctccaggcagaggaacaaacctttcaaaggcctaaaaaggagagtcaccatgggttgttctgggaactgtgtgtgtttaggagatgggaagaggccagagaagttcctggaaatcggggccagagccaggtgactgtggctgtgtagactccttaaagaatctggcatgctaagaggaagggggaccctctagaagttatttcttccacatgtaatagaaatacatccatttcaattgtgacttcactacattctgacaaatatatacacctgtgcaaccaccacaattaaaacatagagtttgcactgccccccaaatctccttggtgcccatttcatccgacccaccccttccccagttccagcaaccacatacctgcttctgtctccatggaacagaggtgtcacttctagaatttcaaaggaatggaacgcagtgtgcactcttttgtgacaggctgctccctttgatattgtaattcagattcaatcatgtcattgtgtgcatgcatttttttcattgccgagcagtattccatggtgtggatgtgccacagctatttaaccattcatccgtttgtagacatatgggttatttctattttgaggcctacaatgaataaggctggtagaatatttgcgtgcgagtctttgcatgaacatatgtcttttatttctgtaggctatgagtggaatggctaagtcatatggtagatgtatgtttaactttgtaagaaactaacacactgcccagaggcatttaagcagaggcatgaaatgatatttcagaaggtttctggctgcagtgtgaagacagaattggtaaggagggaatatggaattgaatgctgcagtcagttaggagattatagcttgccctcaagaaaaaaatgacatggatctgacaaagggaaggacaatgaggtgtagaagtaggtcagtggggagtaagaggagctagggttggcaggatcgggtggccgggtggaggtgggtggggggatggggcaaagatgcttcagacagtgatgatcttggagggggttgggtcatccaccagtttagagaaagcaggagtgtgtttaggaaggtgaagagtttggctttggacacagtgagtgaaataggcaaaataaatccaaagtagctgggcgtccttacaggaagcttccaggggagctccggagggatatgtttctaaggtatcaacatttattaatcgttgaagctactgaggaaatgcacgcccagtttatcctttgtagaatatctgctcgagagctccaggagagacaagaatgagatttggcaaatttgccatgaatttgattctctagggacatgaaaggaacatgattagaatttgagaatgaccctcagaaataagttaattggtgtacaattatcaattagaagagagaggctacttgcatacgttgatgtgtgatggaattaaacaccatactaacccaaatgttactccaactgccctcattgccacctcctgacagtggcgaggggtggcaacaatgaacagctggctatgaagagaaatgtgccctgcaacccataaatgtaaaacacacaagggttttcttcattctgcatggtcagtttcttagtaacaacagtttgctttttgtgtggtgttgtagctaagctcagagaatgaccttctcattctgtgttacttacccaagttcctgagggagggaatatttgcaggagtgttgggagggaatatttgcaggagtgttgaaaattatcccccactaaacaataggatctcacagctcactcaagccctggagcacattgagtgccctggatgggaataatcctctgttcagagaaagaggtgggcatgatttatttattccaagacgtgagaaagcatatggctgagacgaaagagaggcaagacccatacacacttcaaagagggaaacttcccgggccaaggatagaaaacagtgagacaacaacaacaaaaaccatatgtgtgtccacagagagggctcagctagggggctggaaaattgcacagcgacagaaagcataaaaaagtgagttagagctgcatgcactaaaatatcacttgttaacacattagaaaatattttagatataagaaaagggtatgaagaataacatggtgaatacccatgaaccacacccagcacacaaattaaactttgtacaatgcatttgaagagattctctgttgatgtatttgtaatagtgttaaggagaagctaagcgggtactgagtagatgttaaatttagaattcaccctcagctccccttgcttcccctgggtttttcttgatggtgatgatctcaaggaccttgcctactccctctcctcctcaggggcaagcaacctaggcattcacacagggcccaagctcagaagggcccacacttggtttaatgctttactgtcaacaccttgaaactgctaacaacttttaggcaacggatctcacatttcattttgcataaattatgaagctaggcccctccaggtgtctatctaagtgtctttctccagcacagcacagttgttcctaggagattccaaggctgttgcctatactggattgagctgtgccccaaagttcatatgttcgggctctaacctgcaaaacctcacactgtgacctatttagaaataggctcatggcagacggaattaataaagatgagtttgtatagagtgaaatgggtccctaattcagtatgactggtgtccttagaaaatgggaaatttggacactggtacatacatagagagaatacccactgaaggtgaagacagagatcagggtagcatttctacaagtgaaggaaggccaaggtttgccagcaaactgcaagatgctaggataggagcctggaatcacagacccacccctagcagcttcagagggagcgcgatcccgttgacaccttcatctcagatttctggcctccagaactatgagacgatccttttctgctgtttaagccctgccagttagtggtattttgctgcagcagtcccaggaaactcataacctgcatttcgttcctgaccaatcccagctcttcctctcaagctctcagggctctgtttgccaccagaggtgatagctgaggaagtcggggacagtggtgaagtcctgagacctatcaagccatcttagagttttgttgggtttacagcaccatgcccgtgagacagtgggtgtccctcccatgcacataagaccatgggcctttgaaagaacgacttaccatgcaggacattgctgtgaattcagacctggacctgtctcaacccctgagtcttgcctgtctgtgaccttctgtcagatttagcccttttccataactctcccttcaccactgcccaggctttcagctcctgctctgccctgctgactcggcttctgttcccagctcactgcatggatttttgcattctgctttcaggtttcctgtccaaattgacccttagccactcctgtttctggctgatttgctcatctcctctctggtagcttccagggaacttgtccactgcaggatctgagataacaccggctgtcgggtgttccaggtcatcgggtgctaaggttgcacagtgtgttcactgggacctctggggacagtttctcactgtgactgtcttcctcaaacagtggctccagtggcaagaatttcagacacagtgttagcgagcagagagagcatcacagcaaggttgtctctggcaactttgcacctatgtgggcctgtgcaccgagtgtggcctggatcagagcaagatgggtgtttaccaaggacaactcgagggggaatcataactatagccaacaagggggcagaaatgcagtgggaccaggaaccagaaaaggaagtggaacagaccagcctggaatcagataggaagagagaaactgggtcagtccctgagaaggttccagaagctggattttacaaggtgacagctccaggatgtggaaatcaagggatttcccataggatcgctaccacacaggccaaagaggaggcgtttgagggccaggcggaccgtggggtgctttcctcccacttcgatcactgtgcacagccagacttccaactgctatcagagcagggacactcaaactgttccttttggtgttggggtttcttcccttcttgtagaaagctctcctaatcaagagcactactggcctgacactggcttccaccaaattcattttgatgtcagtcataaaagttaggtgggagggcagacctccaggggcacttggagagatacaggaaaaccccattgcctactcgtaataaaatattatggtttgaatcatttggaggcttctggaatcataattttagattatgtttccttctttttttttttttttttttttttttttttttttgagacggagtctcgctctgtcgcccaggctggagtgcagtggcgggatctcggcttactgcaagctccgcctcccgggttcacgccattctcctgcctcagcctcccaagtagctgggactacaggcgcccgccactacgcccggctaattttttgtatttttagtagagacggggtttcaccgttttagccaggatggtctcgatctcctgacctcgtgatccgcccgccttggccttccaaagtgctgggattacaggcgtgagccaccgcgcccggcctttccttctacttattgcaattaagcctaggattaaattgaaaacctagtcatcttaaagaaatattcaaagttaatgcggctatgtattcattatcttaattcctatctattctctccactgataccagctttgacattaggtaacccctatctgaggaagagacatgcctctgtggcccctcaatccctttaatgtatattcctaacagttctggatgacaggagaactctgaggaccaaatgctaagccaaaggcatagttacttgtaatcaaagtgaatgtaaccaggtaccacaacaaatataccaaaggagctcatttcaagatatatttgtttacccatccattagaatgactgaaataaatgaaaaacaaactatcaattgttggtgaagatgtggagcaacaagaactctcatttgctgctgatggggatgcaaaatggtacagccacattgaaagacttgtcgacaatttcttacaaagctaaatgtagtcttatgaggtccagcaatcatgctcttaggtatttatgtagctgatttgaaactcatgtccacataaaaatctgtgggtaaatgcctctagcaactttcttcatatcaccatctggtagcaaccagaatgtccatctgtaggtgattgaaaaacaaactgtggtgcgttcattaagtagaatactactgtttaataaagaatgatatagccagccacacaaagacatggatgaaccttgaatgcattttgctaagtgcaaaaagcaagtgtcaaaggctgcatactatatgcttccaattatatgacattctggaaaaggcaaaactacaaagatgataaacagatctgtggttgccagggtttgagaggaggtgggttaaataggtgaacctgggaaattttttttctttcttttttttttttttttttgttgttgttgcaggctggagtgcagtggcatgatctcagctcactgcaacctccgcctccttggttcaagtgattcttgtgcctcagcctcctgagtagctgagactacaggtgcccaccaccacacccggctaatttttgtatttttagtagagatggggtttcaccatgttggtcaggatggtctcaatctcctgacctcatgatctgcctgcctcagcttcccaaagtgctaggactactggtgtgagccaccacacccagacaaacctaggaaattattcatagcagttaatctagtctgaatgatagtataatggcactatgcatttgtcaaaacccacattaccataaggttcactgtagtacaccttaatgtaaacaaattttaaaaaataatttaggaggttggagggagtaaggatagaagactgaatgtgacataagaatataactgcattgcagatgtatgacacaacctcactgaaggtgctgggggaaaaggtgccaactaaataactctgaaattgagtatcatgtgcagactgcaggcaaagggaactgcacatagcactgtactctagttgttaacattctttctctcagggttgtgggttaacagttctgacactcctctatgtgcatactggagttgaataagtaaatggatagtggatggtaggagccagatttctcactgctggagtgaaaatttacagaaaagcaaggggaggacgctggaataatccatgtggtaatgaattagagttgcagacatgagtatgaattcatgttcggataatgtaaaggaagatgattatatataaaaatatttctatatatgtatatacaagattaacataaacacatatatttcctaacactgtcaggtgagagggcctggaagcagtaacatcttagcagtgatgagcacatctaggctcttgatttctaatccaaaaaaggaataaatacataaatagaggagaatacacaaatcgcctgtgcggtgatttgacagccgtcatttctgggtatctaagaacactcattgaagaactcagagaaactctgcttcgaggtatgttttcggcatagaatgcttttcttaggccgcatggactgctagcgctgcatccagtggaaatttcttcaaaacttccattttcactgtgttggagcaatgatgaaacagatgaaaccagggtcctgacagtccacagcttcttgctaagggtttccaagttctgtccctagttgtcatcttcataattttacctcaagctttctaggttttatttctaagttgtttatgccttaaggatcctcttcaaatattagaatttctgactgaaattttccaggacacacagtctatcttttgtgtacctcctctctatttcattctagcactactgcccttaagccctcctgaattcccataaaaaatgtgtcttgtatctaatatcgtgcagacagtctgctatgtcagagacacaatgtcaaccggaagtgtgctgccctcaaggatctcatgatctgcttgggaaaatacactagacacacaattaatcagcatgtaataagataggcaaaaccaataagtattttgcaaagtgccacaggaacatggaaaatggaaagaggagccttgaggagtgaatatttgttgactttgtgctggcctctgacagctgccttggggaaatgtcttctgccagcttcatgggattcatctgaggctctacacttcctcccactgggatcatcgcacactccaccccagcagatctgagcatcctcatcccttgggcactgtaactggttcagggatagagacgtgataaatgggtccatcagagcctgttgggggattcatatggttatcatgaaggaaaaccatctctctgcttccaggaccatcagtgctaagcaacatggaagcctggagcagcagggcccatctttgcttccatttgcagacaatctaccagagaatcaaaccaacagaaaaggcagcaggaatgaggagagggacagaccaatgcctggaacagtgtttgagctcctggattcagccatgcctggagggagccctacttcttagcctcccatttacatgagtcaataaatgaccttctttgcttaagcaactccaactaagccaaagcctgggccagtccctcccatgtgtgtaatggaattccggctggctgttgctctcccagcccatcttattccatgaagctgctcaataattgtagaattaattaacctaaagaaacactcggattatttttactaaaaaaatcagaaaacttttaaggctactgaatgacctatgacattcttagcctgataagcctcctaggatctaagcaaacctactccttttgtatattgtatgattccacagaagaggaaatactcctaattttcccaatcatgctgcattctttcttacccaggagccgctgctctttctgtcactgcattcaaatccacccttccatctgttcctgcatcccctgcaccagccttacgtcccaggtgcaagagccctcttcattctggaagcttcgttcacatttcttacagcacagtcctaccaccccttgcacggtgtttgtttagacagatgttctcttcttcttcactggagtgtgatcttcctgagaacagggtttcagtgcaatcctgagtcacctttgtatgcctgaaaaaatctggaatacttccttgtgtaccatagtacttccataaaagactgacagatggaggagtgaacaaatgaacaaaagagggattattttgggtgcacatcaatgatactaattgtctggataagggggagaacgggaaacggcccctgtttcctctccttttgtggccatcacaaaccagaataactatcaagagcgtgaagacattcttcacttctggttttttttgaacagttgttaaaacttcagtggccatttccagcccaggctgccaggggaaaaggcaacataatcttttctgcgtagtagaagacacagttggctgaccctgtagtttacactaagcccaaatgcttatgtgatcttggcaattattttctgtttgggatctcacattgcttagtgatattggagcttgatgtgggtagggatgcatggttgggtgactttgagtctagtataagacctagttctttgtcatgaaagtttccatgaggttccatgtaatatttttaaaatctgccattagcgcttgctgtcttattcttatgtttgttgttgttttactgccaggccttcggccaaccacagcatgcctcagttttctcctatatataaaatgggcatggtgatagtgaccgccacatcgggttgcttgaagattaaatgagttaatacatataaagatttagaacagaggttaacacctagtaagtgcacaccaaccacttactaattttcaaatcattatcattaacgtgggcatgatggtggaggacccagatcctggaggacccagatcctacagctgtttgtggaataagagtatgcttgctggaaaaaggcatggggtatctgttgttggggagggctgaggcagtggtgaaggaggcagccctgaggtttggaaggcagatggacacagggctcccacttcatatgtgtgccagtttggagcaaggtcagctttctggcatcccagcatcttggcaccctacaccctggatcaagaccaggcaaagctggggcaggacaggcgacagggtgaaagggccatgggggagcctcacagcttccaaaccttccttccaaacccctcttcgctcatgaagggctgacgtcacttccactcgtcctgacccctgccttggggagcagtagccagtgagcctcctgtgctttgggagtccccaagcccaattctaagctgtgtgttttggctatcactggctccaaccctaaacagagaagccgctttaagaggcacagcagtgagggctcttggagaacagaaccagttggaggcagctgaaagggggaatttttatgaggacatagtgagaatcatgaaagccagctgcctggagatagcagaagcaggcctctgggcagcacacgagccagcaccaggaggcccttctcatccctgctcctctccacacagtagcttcttccttcccgtggatgtgagttcctgatagaatgtgtttatttattgattcattccattaacttttattttaggttcaggggtacatgtacaggtttgttatataggtaaattgcatgtcacggaggtttagtgtacagattattttgtcacccaagtaacaagcatagtacccagtaggtaggttttgatcctcaccctcctcccaaactccattctccagtaggccccggtgcctgtggttcccctctttgcatccatatgcacttgaggtttagctcccacttccaagtgagaacatatggtatctggttttctgttcctgcactggtttgcttaggataagggcctgcagccccatccatgctgctacaaagggcttgcatttagttctttccaggttcaaaaggcagctcattgcctcctgctctgcataacaaatacccaaaggaggagaatgccattcacccagttgactttaggtgtcttcactgatccgatcccttctggcctctgagggtttatccttgtgggtcaggaaggaagaggggccatttaaaaaaaaatggttcccaaaaatgttgatttcccatcaaccaagggcacaggaggaaaccaggatttcctataggacctttaaggtctccttgtccttaagcttcttctgtgtttccagtcaacacggctaggacttcacttctcagcaggatcctggattccccaggcaatgacaaattcacccgtatccagagccaggtcaaactgctgaagacaaaccattcccaggaaaaggcacacattcctggccaatttatatgacacctggaggagaaacagccgtggagaaggtaaaactccaggctgcacctcttctttctgctgtggttgattggaaaggacagcactgtctgatgggatttactgttttgtctcttcggacctgaaagtttgttttgtacttgcaaatctggacccactgtcaccttgtaacaccctccccctgaaaccttgaatgacaagaagattaatgaaaactggcacctgctcactccctttttgcactgtcacccaccctgagggagacgcagatctgatgatttcgaaaaggttcttggggatttggccacagtctcctttcagattcggcagtcctggagtgtgagagctgtcagagtcgagcctggagttttagaattacttagctctaaggggccgaagcctacaaactggtacggtgcttctccaacattaggaaatatggtgtcctttttttttgtgggtgggaggaggggtattaaagaggcagtgatttaaataattgaaatttggagctcagtgtgactctgagatgagacgtcatttactttaaaaaatcagaagtgtgtctgttctccctgcagagagctgcctggattcctttcctgaaccgcctgcttggccacacctcctgacatcctgtgctgagctgagtgaaaactccacgctgggagaaaaaatgcatgaggaaagaggttggtctaaggacgggtttctacttgttttgtagttttctgggggtaaaacaaattacattgccacagaaacttcattttctatatatttttcaagaagtttttcagcagatttagaaactgtacaaagataagagcagacacagtagcacaatttaaacagagttcaatagaatctgatttatactcatgatcccagagaccagagcatgtattaataaaccatctctgggggaaacccatgttaacattccaaaacttatcccaggttgaatcttctgctatatatcgtcggacattaaaattccctgaagaacttcagactgcaattttgctttgcagaaagtcggataatatcacgtcctctggctcatttctcagcgagtaaagatgcagacaccaggagacgtctctgggctaaaaaacagtgaggcattctgctggtatccatgtcggtgctggctccagacatggcagggtttatcttgcctctggtggcctatgtctgcaaccaggatggtcacctgttaaaatgcatgcagtgtgctcgggtacgtcacttccaacagccttctttcgtgaacggctatgatgcacaggtaattggcaatatgtaagtgctcaacactgtcattctcaggtaatgcatctatttttttaatagctcactaagacatgacataaagaacaatgttcagttcccacaagcatgcaattggtcccaacatgtgcatgaatgggtgcattgccacatgatatgatggaattttttaatcttgcttgctgtgcttaaaggagctgagaaatgcttcacagcaaaggcaagaatgtgtttgaagaggaggaagcatgctttatttcctgtctaaaaagttccttctccatctacttcatcaaagagatgattattttaatccagctgatcaacagcacaggaagaaactgcccctgcttcttcacagagcataagtgtcactttgaggaggtcactagacctttgtaggcctcaggcttgacactggccatgtggagatcgtaatcatcgaagaacgtcaaggaggaaggctgtccagagctagtcctgacattccttaaaggtcatcttcccagccccgcctcgcctcagaatgagcgtgatctcaaaataaaaggcactcatttaatttgaatacatttttatcaagacagtcttataatattgttcaaaacatttcacattgtgttcttttaaattaactttttgttttaggttaattttaggtttatagaattattataaagataatacaaacaattcccataaaccacacaccctcttatctctatccacatcttacattagtatggcatgttagtcaataaacctaccagtaaactaaagttgatgaattattattaattcatgtatagactgtattcaaatttccttcatgtttccctaatgtttactttctgttccaggatcccacccaggattccacgctacatttggttgtgtctgcagctcctccaggcagcgaaagtttctcgtactctccttgtttttgatgaccttgacagttttgagatgtattggccagatatttgatggagtgcccctcaagggggatttgtcttatgtttttgtcatggttgggctaaggttgtcagttctggggaggaagaggacagagcggaagtgccattcttgtcaccttccgtccagggtatgtggtaccagtgtgacttaagctgctgacgttgaccttggtcaccaggctcaaggtggtgtcagggctctcccctgcactttcgcgttctctccatttccacactgcactctgtgtccatgcttcgaggtgggagttagcgccacctcccagagagtcggctatctaacaaaattatccagaattcttctgcaaaggagatttgtgtcttctcccccatttatttgtgtatccaacatttatttatatcactaatggactacagatatttattttatattttgggttgtaatccaataccactttatttattttgttgttccaattatttcagcttcagctgttggggcatcttcagtggctcctgtgtctttttgccataacgccgtcattgaaactggaggttttgttgttgttttggaacattcttacttccaagacctacaggatgctccaggctcatcttgtccatttcttgccccagtcccagaatcagccatttttctaagaaccccaggaggagagtagtagaaatatttggagaatattagaattccagttgtgctttatttctggagaaaacttccagcctctggaccacatagtattttggttgattctcactaaaagtttaggtggtaggcattctcattaaccccaggttacagatgaaatgtgtagaagggtctggttaggatgtggtggaggcagaaatgagacccagatggatacagctcctcactgccccctgacgattccagtgtcctctctgttgcattccccttcgttccttctggtgcagcggctgcggaagcagacatagcatggtactagaaaggatgggagaacaactgcagtgctggtgtggccgtgggtgctgagctccctggggttgcagattgtgatacaggtcggtgaccgttccctggccctggttgaccaggttactgtgaccttaacatcctctgacacatcttctaacctttcacgtcagatgtgctcttggaggacaggccgccaccctaagagctttcaccatcacagactgcccgcctgtctgcccatcgccctgcaggcctggccagctgctggcacaatggctgccgcggaagccctcacttggatctgaacgtttctcccccatgttcagttaaattaactcaactagtaacaaggggttggcactttgtattccagggagggtggattagagtcatttccattagccctaattgaggccctaaagggaaatttaatttataccccaaaacactgctacattctgaagtcagcggcgtgatttgagagaaacgtgagatgtggcggtttaaaaataggtccatttttcctgagggaagaagctggttttagcctttcaatttgaaaatattctaacaccattgtatgggggaaattgtttcaacttaaaaaaatactagttccaaaagaacccctgaagccccagcatttatacttaggctccaatttgcctaggcccttcacttggatccgaggcactgtgtccaccatctgggcagagccctttgcctgggtgtccaggcacagccccttgtctgggtgtccgggcagagccccttgtctgggtgtccgggcagagccccttgtctgggtgtctgggcagagccccttgcgtgggggcctgggcagagccccttgcctgggtgtctgggcagagttgcttgcctgggtgtctgggcagagccccttttgtgggggcctgggcagagccccttgtctgggtgtctgggcagagccccttgtctgggtgcctgggcagagccccttgtctggttgtcctggcagagctccttgcctgggtgtctgggcagagctcttcgcctggatggctgggccgttcctccttactgactgctttgtacaaggtgccttgtcatcaacttccatccaaaggggaatggggatgttcccctgaatcatgcacagtcacctacaggcagagagagaaggtgcctaatgacatgttgttagggaaaatagctaacatgtgccttggaataactaatttcttgtgaaatggagctatttctttcttcactgcctctactgagataaaataaaggggccccggcattgccgagggaaaagcagaacgatctgtgcaaacatttcatttgtataaacagcttcccttatgacatgggtactatttgggattatttttaagacaataaaaggtagttcatagctgtttttctgttgtttgctcattttgacacaaaaatttagagtgaggaaagggaaatagaaagataaataagatctgagcaaaaacaaagaagaaagagataaaatacaccagacaaaaccactatgtattcttgacttaaacaaataaggcaattgcataaactttgaggtggaagagtcaaccagaatgataaaacctcaaaaattgggccagacacggtggctcaggcctgtaatcccagcactttgggaggctgaggcgagaggatgacctgaggtcagaagttcaagaccagcctggccaacatgacgaaaccccatctctactaagaatacaaaagttagctgggcgtggtggcacacacctgtagtcccagttactcgagaagctgtgccaggagaatcacttgaacccgggcggcggaggttgcagtgagccgagatcgtgccactgtactccagcctaggtaacagagcaagaccctgtctcaaaaaaaaaaaaaaaaaaattaaaaaaccctcaaaaattggaagatcaacacaaaaaagggtaaaccaccaaagtctggtgagaatttctatgtcttggtcactccaaatgccaatggatgaagaaggtggaattgatgattgatcaacaggaaaggctcaagtgggcagaggcccttaaaattcttctaagcactccatttttttatgcttggttcttattgcctaggttttccagtgagatagttcacaggcccctaatctacacaccccaatagctgagactcttccagcaaagccaagggtgcaggtttcctaagggagacttgagcccagaacccagtgcaatgggaataagcttctgcccagctgagaggaaatgccctccctcaactttcactgtttcattgggcccctgggccccactgtacaggttgtctaccctgcagaataagtttctccaatgttggtgacttaaaacagccattttttctctcttagtttctgtgggtcataggttcaagtgtggctcgtccgggccctctgttcagggtcctatcaggcagaaatcaagacatgggcggggctgtctcatccaaagcttagggtccaattctaaggacaggtagttgtcggcagaatcatttccttgcagctgtgaaagccatggtggtttgtatcttcaagtacagcaggaggaaaagtctctgatgttgtgaagctctttgattttgtccatctctgacctttagagtttctttttctaaaagactcctttgattagatcaggcacttccaggataagctgaactcaaagtcacgtgattagggatcttaatttcatcatttgaaaaattccacctttgccatgtgacatagcctaatcacaggagtgacatctcatcatagtaataggtcccatgctcgctcagatggagggggtcacacagggcatgttcaccaggggtacgaaccttgggggccatcttagaattctgccatgacagctaccaaatctaaatcagcttctaaggctgctgctaagagcataagtatttatttctccaaagaaagcacagtgcagctattacctaaggacaaggagcacagtaattcatgcgtggagcattagaaatggggcctctaccggtggggggggtctgttttctccatctaaaagtcccctgttggaatgggctgcaagtacacttgggaagggaggacagctctccagcaacaagaggagaattcattaagtcacattctctccaggtgccttggctcctagaattccctttgtattttttttccttttaaacacagaatgtatgttagaatcccttaacagttttcagatgtcctggtgagagtttaaaaggaggctttactgggattctattttccttctttgtgctattaagcaaagaaagccatttaagggtatcctggcagtttcgtgtagctatcagacagtgaaatgaagagatcacttacaacctgacgttgatgagaacttggaaggagtctttggtgcccagacgtgtctccttactaacaggagaagatagcatttacattaaaacctgtggcaaccaataactgaatgtaagaatatcctcaattaaagtgtttttccccctacatcccacaagtgggggaattctggtaactgggcattgcagatgcagtctcaacaagtgtctccaaattcatggcaggaggttgttctcccaacagagtctcatataacccatcacatcaacataatagaaacccgaaagtggggactatgcctgctgcttccctatacccctcagaaaacagcccagaagaggaagagatgcactattgtgtttttctgtgtgtttttattaagtagcgcagggcatccatctttatcttagagaaagtaggacatttatctatgcacaaagaaaatgaaaaatcacttgcaatcctacagtgtagaaataaccaaacacttaggatctcttccttcaaaatcttttcttacatgtatatgtggagaaagcaagagagagaacattttaaaattaaggagatgataacatgttcgttgttttctaatcagtttttttttattagacaaggttcttttcaaaataaaggccatgtcttacatgttgctgtgtttccagagcaaagcacggcactggcatgtagtgagtcctgagtgatatctgtagagcaaacctgtccctgtaaacaaacatggaaccacagtctcacgtcagcaattgcacattggatgatattataattcggtagttcccaaagggtgatattttaccactaagaatcttaggtggcacatggataaaaatgcctttataatttgcacttgaaaaattatgtaagcagcctatcagccccatgattgcacatttttttaaattcagcctaagcactatttaagttaaaaaaaatttgagtgaataataattcaggaggttctcagatttgacaaaaatgataaagatggtacctcaagtgatcaaagtatagaatactgagacatgacttattcagcaatttccctcttaacacacttattgacaatgtccttattttttcctgttataaaaatgctgtaacatatttctacctgtatttttatatacttaattgatgattcccaaacagaaaactccctagaaatgaaaatgttacatcaagtggtttgaatgctttagggctgttgacaaataatgtcaagtattgtccactacactgccttcagccacgcatgagagaaagcaagcagcttagcatttttggaagctttccacgagagtggaaaggcatgaggattttgcacaaggggaaatgtgcagctcactggaatcatgcctgcacctgctcagggctcctctcccattggtcctcatgttcccctaggtcttggttcctctgattcactcactcttctgcgactttctctctctctctttctctctctctctctctaatctctcctcctggcctttctacccccaagatagagctgtgtgtacattttcagtttagataataatgcaatgtgtgatattttgatatttatcattcaaaattaaagaaagctgatatttatattactaatgaggcatttccacggatttgcctttcagtttggagaatccctttaggacctaggtggctgcctgtggctggaaccagaggtctctccagaagactccagggctttccctaggcaactggcatttaggcctccaactgctttgctttcagtggagacagcaccgcccccactctttgcctgggcctctgttgacccactctttgcctggccctgcccacctcgactgcaggcttctggccatgggtcagaactaccagctctgccaaggaattctcctagaggatggagccacccagtcacctgaagtcatttcctagagccctgaatgaggacacctgtctccaacattgagtctggggaccgttcctggaattaggattgaaacaaaactggaagtgatgggaagacggcatccatgtcagatatttgccaatcatacccacaaaccatatatttaattaactctaattgataaagttccccttatcacttataaaatttgcttcagaagcacaatgcatatatttagtgtgaatgcaaaaccattaccattcacagtaagaaggttaccatataatttaaaacagtgaagacaaagaaatgttccttgaaaagtcttgctttatactagcgcctgccgaggacctgagcctgcagcccttctctctttctttaggaagattagtaggcaagagggttgctgaagacaggataacaacaggggtgaggctttctcctcaactcttcaggagacttgaaaaagaagcaaagagatgacccctctccttcaacgagatggtgctagccagtccccagtcccaacatcaacaaaaacaccactccatacttcgtgaaactctgaaattatgatggctttttggcttcaatgaaaaacgaacacacaaacaaatagcaaaccaaaacagtgcaagatggttcagcattcgaaaatggatcagtgtaatacatcacattaacagaatgaagggaaaaaggcaacctgatcactgcaatgggtacagagaaggatttgacaaacttcaatgctatttcatgatgcaagcactcagtaaactaggaataggaggaaactacctcaacataataaagccttatgtggaaagcccacagcgaatatcgtgctcaatggtgaaagactggaagcttttcctcttagaccaggaactcctaccgcttgactgaagctgtgggagtggcatacttgccttgttcctggtcttagaggaaaagcttccagtctttcaccattgagtatgatgtttgctagaacctgcaagctctagccaaggtaatgatccaataaaaataaatgaaagacatccaaactggaaagggagaagtaattatctctgttcacagatgatataatcttatatgtagaaaactctaaatattccacacaaaaatacctgttagcactaacaaatgaatttaataaagtattataatacaaagtcaacacacaaaaatcagttgcaattctatacactcacaacgaacaatctgaaaggaaattacaaaaacaattctatttacaatagcagccaaaataataaaatgctttattttattattaaagtgtaaggaattaaacaaagaggtgaaagacttgtacaataaaatctatacaacattgctgaaaggattttttaaattgtgataaaatatataaaatacgatcttggctcactgcaacctctgcctcctgggttcaaacaattctcctgcctcagtctcccaattagccggcattatagtcatgctccaccacacccagctagctttttttttgtatttttagtagagacagtgtttcaccatgttggccaggctggtctcaaactcctgacctcaggtgatacacctgccttggcctcccaaactgctgggattacaggcgtgaaacactgcacccagcctaaaatacatataatatgaaatttaccagcttagtcatttttaattgtgtaggtcacgagtgttaagtatgttcatcttgttgcccagctaatttccagaattattttgtcttccaaaaactgaaactctgcatccatttcccctcacaccagcccctcatgaccaccattctactttctttctctatgaaattagccactctagatacctcgtgtaggttgtgtcacacagtatttatcttttcatgactggcttattgcacttggtgtaatgtcctcaaggttcatccctgttgtagcacgtgtcaatttccttccttttcaaggcagagtaatactccattgtgtggaatgtcacatgtatgggttttgtccaccttttgatgattgtgaataatattgctctgcacatgggatgcaattatcttttcatgtccctgcttccaattcctttgaatgtagatccaaaagtagaattgccagataatgtggtaattctatttttaattttctgaggaattttccaggctgtttttcatagtggctgcaccatttcacacccagggttctggtttttttaactgaactggactgagagtgtgaacctgagtgtgaactgaactggactgagaagtgacatgagggaatttctattatttgagagcatcagaagaaagtattggtcttttgtcctaggtctacccatcaggtttaaagggaccgtgaaataaaagaaaccactgcttctgctcacacgctacggactcccactccttcactgaaccagctatgcaagcaagctagcaagcccagctccaggccagcactcggcccacactcccaccttccctcacacacaagcagcctccatgctctgtgaacacacctggtccttccttgccttctggtctctgctcccaccaccaccttcatttgaggacatagaactccccattcagggaatagccctgcccagactccgagtggcctgtgcggtctctcatctcagagcttaatctctggggactgggctttgctattttaatcccagctcctgagtctgacctgcatttaaacctcggttttctcatctgtagaataaaaatacatatggtattaatgccttataggtgccattcacattgctgtgaacaataagcagggtaatgaatatcaaatgctagtgaatgctaagtgtttaatacattatcctctcctctcccttcccttttcctgctcctcctcctccttctttttctttaatctccccttgctcctcctccttcttctttttcctcctcctcctctttcttcttcttcttctcccaccccttccccttctccttttattatacaaacatatgtggggcacattccagactggtagttgataacagtttggctctgtgtcttcacccaagtctcatgttgaattgtaattcctggtgttggaggtggggcctggtgggaggtgattggatcatggggatgatttcttatgcttcagcacaatcctcctggtgctgtctcatgatagagttctcatgagatctggttgtttaaaagtgtgtagcactttcttcctagctctgtctctctctcctgccgccaagtgaagacatgcttgcttcccctttgccttcttccatgtttgtaagtttcctgaggtctccccagtcatgcttcctgtacaacctgctgaactgtgagtcagttaaacctgttttcttcataaattacctagtctcatgtagttctttatagcaggtgagaacagactattaacagtgttctcttctttattttactgaccattttctttttcattacagccaggcccagggagcagggagccggaggggggcgcatagggaaatgtcaccatcgtgcccatcctgtaggtcaagccagcccagcccttgacctgatcagcttgagttcttcagtggctcttctgtgtccgcatgcttgtcaggcctttccagaccctgtcactgtgtggaatcctctggtctccacctcacctctgcacctcaagcctggagacagcctcttcactaatcactcagtgcaaatggcaccttctcaagacacgccctcatgtcaccctctctcagagcaccaggaacttctgcctggtaggctgtgctatctttgtggtgattgcatttgtggttgctttctcagtgactgcactcaccttcctgtctgtaacctccatgagggcaggatcctgatgggttttctcaccattgtatccctagtgtagactctccataaatactgttaaacaaatgaagctctaatggcttcatcaagccccatagtaacagcaaaacaggagctcaggctcagatctgtggaaggccagatctgcttgctagctgaatcaaggcatcttgctctgctatttcatgtggttgaaatctcagactcagcaaatgcacaattaactagatcatggactttgaagctactcacccacagaaaatccatgatccctcctctgacacatttgcattttctgttccttctggctgaaatgttcttccttctctcctcatctccacacaactcctcaaaatttgaagtcttccttggattatcccactagctccaatccccaggtgattgcctctcatagggccacagctcctgctcttgcaacatctgcagttggattttacatgttggtcacatggttacttggggactgtcttcaccccttgacaataacctgcttcaggccctagcatggtagcaggctgagagcaggctctcagtgtagacaagctaaataaatgggtatatgaatcaagtaaactccatcaattcaggcacacagaaaatgtgtttagacctggtggctgagggaagaccaaatatctgtgatcattttggttttactttctagagcaaaacataaggccaagagaggaaaataaccagattcaaggaaattgatggatactcataaattaattgccagtttcagccactctcagaatcatgtgatgccataggctgccccatcagatttctcggtaggaatacaaaccttcccagtgttcacaagatcctccaacaccacgcctgagtggccaccattttcctagatcttgttttatgattcgtttcaactgccagcagagtgttgctgctaccagtgcaggagaatcaacacacagagcttagagaaagagacatttgaatattactgtccatgtgtctctgctcaaacaagaggaagataaacttattattaatccaccgcagggtgtgccataaagaaccaatgcgtccaggttacacctgcagggcatgattaataaaatcaaattccagctcgttcatatcatttgtccttaaagtttgctgggaagaagaatcatggtccccaatgatcaaattatctgatctatgctctgcagctgtattgaaatgctctcttcttctctccatcaaaccactgtgctctacagtgtgctgcaagggagaaaggatgctcagaaaaacaaagagagctcctgcagccaggaaaaacctgaagatttttgtaacaagaaaatatacatttattttaaacatacacatgtgcctgtggtttcaatgtataaaatgtttatttggcaggtaaagccattactacatgggaggtaatatggaaatgaagaacaaaaacaaaaacagtggagtaattttcattttccttttgtcctcaggaatataaaattatttcttcatcaagagaaaaataattaaacacagcctcaggagacctgaatctaagcctggttctatctctaaatagctgtttggctttaagcaagctgcttaattgtttcaattttttgttaagtaagtacagaacaactcattatttttcatatatgaaccaaaataggcttgttataatctgacttagagtgaaaatgcatttactgattcacatgaaaaaacttgttttattacattctcagggtaactactttagccattaaaaatattaataagaaaatcagtacttctctcatgatcctaaaatgttaatatctcattgacattacataacagctcagcagatgctactacttaatcctgaaaattgactggagcctcagtgtataccatgtcctgagcactgaccttgatgatgctaagaacgcctcccattttaattctgtgtgcctttattgtatgctgtgtaggtctgtttgggaaatgtgactgcctggtctactgttaaattttagaaacagactctggctgtcaataatgattgatcatttcagtttaactacatttaaatccagaacctgattatggatgctaatgggtcttaaattgaaaatagagaagtcaacacactattaacacgtgctctttgacacacacacacactcacacactccagagggcagatcaagaattcaacccccctccaattttctgagagaaacccctgccttattcctgtatgagcctgagacttttcatttattcatgatcaaatatcaggtaagggagcccctctcccaaatgattgctccttttcaagagttgcaagaaatccgatgcacaccactgtgtgtttccattccatggcagtgagctaaaataaaagcaggaggagggggaggcgtgatcttgctggaatatttaagttgttagagataacctcaagatgcttgaaagccctgggacgtgacccaccctcccccagaacagaaaagcaataaggcccatgtgcagagagctgcctgctcagataggagccacgaaggcaccatgttgcccacttccactgacggcagcacagcccttccctcctgcctcctgcctccctcctgtctgaagccttaacactgaaaattctgtttagtgtttgagtctagaagaacagaggaaatctgtggtatctccctggctttcctcgtgttgtttgcaatcttacaagatacaaaatagtgcaggcaaaatccccataagtgtaatttccacttgtgagaggaacaacaaagcaaaacaaacaaactacaaaatcttatttaagcctatgtctttttttaatacatttacacaaaaacatttaccctgctccctatctttttgtttatccaaaaggaagccatttttctcttccagtatccccatagaatatcatatttacttttttacagcaaaattgtaaaagttttccatgtgttttaaggaattgttactccccaaggggaggcctgtggtataagcaggtggtcaccctgggtcactgaggacatttttcttatttgcagatgtggatctagttcaggaaatgtgtgactgagaaaggggggatccttgctgcacgtgatgacccacactgtcccttgtttggaacttgagctgtgtcatctgggttcaaatgctcagggaggtatgcaggcatcttcagttcactcagtgatacacattggctgtgtccccacccctatctcatctggaattgtagcttccacaaatcccacgtgtcctgggagggaccggggggagataatcgaatcataggggcaggtctttcccatgctgttctcatgacagtgaataagtgtcatgaggtctgatagttttataaagtggagctcccctgcacaagctctctcttgcctgctgccatgtaagacgtgacttttttcttcctttgctttccaccatgattgtgaggcctccccagccacatggaactgtgagtccattaaacccctttttctttataaattacccagttgtggctgtgtctttattggcagtgtgagaacagactaatacatccagacactgtctcctgcacaaactgtgactttcgttcccgctcctgtacccacagcttgtcctgttcacttggcatttcttccataagcatctgttgactgtcttctctgtgctggaaatggagctatgccctggacatacattcaatagatgcttatagaataaatgccaagtgaacagcaagggttgggataaaacatgggacttactctccagagactacagatgggtaatgaagccagatgagtaaacaggaattgaaacacagaggcttgtggttgctgtggttgcagcaatgatgataaccatcgtaagagcagccaccacgcactgagcaaagcccccgtgccaggcctgttttgaagaactgcacctgtgttcactcaccgggatccagagagacctgaggaggcaaaactgggtctgcccattgtaaggatggggaagctgagggatgcgggtttaggaggctttcccaaatttgccccaagaaccaggtggtacaaccaaatcttgaagcttgatctgcttaattttagagcccagatactcacccctgggctgtcctgccctggataccgtgctgcagtagatggggcatgagaaaggaggaattttaacccttccaatttctgatttcatctctattagtcatattgccctgtttgttattttttttttaaataaaaaagatcattatggaaagcctaccatgagacaggctgttccgggtacacagatgcaaaagtgcacaggcttaaataaaggtgtgacagctgcgaagggaagaaaacccctgtggtgcccacaaacactaaatttactaaataaaagtgggagagacacagtcaatcatttcactatgttttatatttttacctggataaattaactatttacagtgtcatgtagacaaaacataattctgtgatcttagaccagtggttctcaactgagggcaactttgtccccaggagacatttgtcaatgactgcagacatttagacgtttttggttgcaacgacagggcatgcagggaggtggggaggtaaccaggagatggacacgagccatgctgctaaacatcctacaatgccaggaacagtcgccacacaacaaagaatgatccagcccaaatgcaatggcgctgaggttgagaaactgtgccttcagtgtgtatctaaaccagataggcattaacttgtttatttttggatggagatcactggatattgtcataacagaaccaagttgtaaatatacctctgtgctgtgtgcagtaagcactgaccagacttgcttgatcttccctgttttgcatacatcttttctctcatcaaacttaagatcaaatgagcaaatagggtatttgtatcctcacgtcttaaagttgagatatacaactgataatgcttacagtgtctttacaaaagatccctcctcccaacccctaaactccgggtgccctgtccattgaccccgagccaaacagacacatttcccaaggtacaattacagagattgactgccagttagtagaaggcaccctggtatcagctaatctgaaattaagtggaggatagtttgttaaggctctgttttgttaagcaagcaaaatgtaaaaccttcacatctttagtgattgattaatgaccttttaaaggaccctgctaaatggaacaattgaagaatgtgggagcaattaagaagctttgcaaggcagttcacttatcaaaatgacttagacaagatttcagctggatcatcgccccttatacctcaaaggctgtcaaatcgtatcaaacagccccaagaagactattttaggcatatcagcaaaatgccaccctgaactttcagcagcaattataggcataacagatattggccacatagagatctgggctcaacttctccatgagcttcgatctacacaccccagataaccagcagatccttttcttgccttctgttataggtatctgctgtttccattagcatttcccagataaaagccactgtctggaaagggtaaaagctaagctagctcaagtgatgcagcactttgttccaggaaagctgcctttgaaatagcaattactaatgtgcacaggtaatttaaggaaatggagctaaagctaccacagagcttttcacagaaatatcgtcctaagcgtttagtctccattcctctttcttccccgggcgtttctgtttgatgaaaatgaacttgttccttcagagactgtctcagccctttttgctgctcatagagaagggctctcccaagtgcacaacatccagggtgattgctgaatgtgttatttgcatctggacagagcagctatcccatgcgctggtctcttcctggacagaaatagcccattcctttctgaaccccaccctggctccctggcctgctgtggcaaaagagaagattaaacattcactcagacatacttgtcttagaggttcgtttttaaaagcaccacatgccaaggacatcaccaaatgtaatctctccctagggcatgataaaagtgagtgaactgacttacgattgcttacgatggcaagattttcatttcttgaaattcatggaccgcttgggagggttatgagtcaggttctattctggtttgtatcttcactggtggcctctgagtctgtatccaagggatgggacctgtacactctagtcctccttctgttgacccaagcccagggccactctctgctccagatgaagcaggcagactggacttctcattgatgtaccttccttcatgggattttccaaggacaaatgagagcagtaagaatcggtgcgcccatagctgatggctctgactctccatcccccacatctcccacccagagcttattgattccatggggcccttctctccttttacagctttccaagccctgcgatgacccggatctctaaagagtggtctcagcactctcatttgtataagggagatacagatgtctacctcattcagccgtgagaaataaaaacactgcaaagctcttgcaaatgtttctgggattctatgctagaatctggggaagagatctggaaagaaggaggggagtatggaagagggtttgcctgaaagtggcgatggcagaacaagtatattcttttacaatatttaagccacacattttttaggatggcattgtgtgccaaggatgcttttatttgcactctgcataagtttgtaaaaatatcattatacatatcaaaatctattataattattattattatttgaggtggagtctcattctgttgtccaggctagagtgcagtggcactatcttggctcactgcaacctgtgcttccgggttcaagtgattctcctgcctcagtctcctgagtagctgagattacaggcatgcaccagcatgctcggataatttttgtatttttagtagagacggggtttcaccagattggtcaggctggtcttgaactcctgacctcagtgatccacccgccttggcctcccaaagtgctgggattacaggcatgagccactccgcccagcccaaaaactattattattcttctcaatttactcagagtaactagggagtaaatgttgagaattatgagacccaacaatcccacactccacccatagtcactccttaatactgcctctgaaagaggcttcgtttcttttgttgtggttgttttaactttttagtttgaaatcattttagatttacgtaagagtcatgaaggtattagcgtataccctttaccatacatgcttaatcaatttcttctaatggagacatctgacaaaactgtggtacctttaccaaaaccagtaattcaacattggtacactattaactaaaccacactctttatttaatttcaccagtttttccattaattccccttctcagtatcaaaatcccatccaagataccactttgcatagtcattctgtctccttagtcatctctggtctgtgataatttctcagactttcctgtttcttatatatccccagtcgtgtttgtctcatgttttctcattatgagactgcggttatggatttgggggcgggaaaagagcccgtgggtgaaacgctgttctcaccacctcacatcagagtacaagatgtccagatggcaccctggacacactgttagttactgggttggtggggtctgtccagttgcttctctgtaaagctcccagcttcccacgtccaacctctcttccagggtctgcaaacattttttcgaagggccagatagtagatattccagactttggagatcaaggggaaaaactgagattaccctgtagatatttacatatataaaatgtagcattggaaaatgtaaaaaaaaaaaaaaagaaaaaagaaaaaacatttagcttgtaggcagtaaaaaaacaaacaaacagtcaaaacaacaaacagctggcttcggtcctcagaccacacattgccaactcatgctctgtttttcaggagcaagtcaccaagtcttacctgtacatgaggggaagggaactaacctccatatcctggaagaaggagtaacaaaaactttggtaaaaccaccaaggcaaatagtaattattttggggcaaagcattgaagctatgcaaatactctgtttctcctcaaagtttttctgtctgactttagcattcatccatggatattacctgcaacaattactactgttgtcttctaatgctaactttccatgtcctcatttcatctacatttattatttgaaattcttctttaaggaagatttgtcccatctctcccacttatttatttattcagtcaactatttttatcagtatgaagtcatgattacaaattttattctttgggttattagctcagtgtcatgatttattttgtgacccaaattactctatcttggacaactaggagctcattcaggttctcctgtccttgtgacatgctcccatctttttgcggggggcaccattttaactttctggcactacaaggtgctgcagacttatctggtattttttctgatgtaatccttaaaatcagtcatttttttcaaaaagcttgggttcttttcattggagaatgaagcttagaaaccaagatatgggtaccagatgtgctcatctcttctgggatataactgctctgcagacagggataagaaatatatctacttacataactatatctataaacactaagtccattcatatgcaaatatgcatttttttctgtatctatctgtacatatatttaaataaacatgactgcatgctaatattcctaactctaatcttgcaactgcaggtccagttcagtcttccccttactaatatgtaacttcttcctgtgacagtaaaaaacctggttctcattatctacaatttattcatttatttgttcaattctagtgtacagatagtttcaaaacttttatcaccatgaggaaaaactttaccatctagagtgtagtgttgtatatttatggttgccttcaaatatctagacaaatcattgctttctaaaattaattaggcgggcatttttttttctctaccccctacaatgacggtatgcaatacttgtgtaatacgataagatgcattgtcacaatctacatcacatcctgcaatacccaacatcctggctgattatcttttaagtaattttaatgtttttaatctccattgagtaatgatcaatctttgtgatgtatgattctcctggttttgacaaatacttaaagtcatgtatccacaaccacaaaaccatagggaatattctgattattctaaaacttctcttacaatgacattttgtagtcaaccactcatacttcccccaaaaccttgtaaccaggtatctgttttatatctctgttgtttttcctttttaaattatcatgtaaatggaattatacagtatatagactttttgacctggctgctttcatttagcaaaatgcatttaagttttatctattgttatggttaggctttgtgtccccacccaaatctcatctcgaattgcaatccccatattccctaagtgtcaagggagagaccaagtggaggtaattagatcatgggggctgtttcccccatgctgttctcatgatagtgtgtgagttctcacgagatatgatggttttttaagtgtttggcaagttcctcctttgatcattctctctcctgcctcctcttcaccttctgccatgattgtaagtttcctgaagcctccccagccatatggaactgtgaatcaattcaatctctttcctttataaattaccaagtctcaagcagttcttacgacagtgtgagaacagactaatacatccatgttgtgcaaattaatagtttcccccttttagttgctgaatagcatgccatcgcaaggctgtactgcagtctgtttatttcactgtgaagggcatgttgtatgttttctctttggggccataattaataaacatgctatgagtatctgtctacagatttatgattcaatatacatttctaactttcttgggtaaatacctggaagtaagattgctggattgtacagtaaatgttggtttaacattggacagaacggccagactgttttccacagttttggtaccattatgtgttacctcaagcaacgaataattatatttatatgtgttactttgggaatctctgttctgttccattgatctacatgtctgttctttcaccagtgccgtgctgtcttgattatgataactttagggtaaactttgaaattgagttcagcgattttacagttttgttcttcttgtgttatgttagctattctagttctttgatctttctatataaactttaaattcaactggtcagtatgtatagaacagcttgctgagattttgtttgggattgcattgaataagtagatcaaattgggaagaatttatatcttaataatattgcatttcctaatccatgaatatggaataccattccattcatttagatattttatttattttattagcattttgttgttttccacatatagatactgtacttattttgttatatttatactgaagtactttatttattttggtgctattataattggcattgctttttaaatttcactttccaagtgttcattattggtccatagaaaatcaatttgcttttgtactttaacgttatattctgtgaccttgctatactcgcttgctagttgcagggttgttttattttgcatttttgttcattttaaaggatttttcatgtagacaagtttggcatctgtgaaaaatttttatttcttctttctcgagctgcacatattatatttccttttcttctcttattgcactggctgagatatttagtatggtgttgaacagaagtgctgagaggagacatcctttccttgttcataatcctgtagggaaggtttctagtcttctactatcaagtatgctgttagctgtagggttttgtacatactcattgccattcaaagaaatgttcctctattcctagttcttaacaggattgtgtgttggattttgtcatatgctttttctgcatcaactgatatgatcatatgatttttcttctctagctatgaatgtggtggattacatcaattagttttcaaatgatggacaagtcttgcataccaggaattaatcccacttggtgtggtgtttaatttttttatacattgttgtattaaatatgctaatggttcattgaggatttttgcatctacattcatgagagatattggtcaatagttttcctttattgcaatgtctttatctggttttggtattagtgtatgctggcctcatataatgagttaggaagcagttcttcttattctgttttctggaagagattgctcaaaattgacacaattttttaaaactgttgaaattcaacattgaaagtgtgagcctagggcattctttttggaaatttattagttattgattctatttatttttagatatatgctaattgaaattatctatttctctttgtgtgatatttgggtattgtgtctttcaaggaattggccactttcatgtcagttataaaattagcatagagttgttcatagcttctctttttaatccaattagtattgatggaatgggtagtgagcatccttctttcatttggatattggtaatttatgtcttctctcttttttcttagttagcttagccaaaactttatcaatttttcaatttttccaaaaaaccaagttatgaatttgattttttaaaattatgttctttatgaatttcactgatttctgctcaatttttatttcttatacttgtctgaggcacaaattgcttttctttctctacttttcctcaggtgaatcttagagtgctgattttatatcttctttgttgatacatgcatttaatgctaaaatttatctctaaatactgctttccagtgttttgattcactgcattttcatttttatttaattaaaaatatttttattaacttctccctagacttcttctttcacccacgtgttatgtagatgtgtgttgtctaacaggcaaatattgagagaacttctagctctatttttcttattgctttctagtttaattccattatgacctgagaaggtactttgtgtgatttctatatacttaaatgtattaaggtttgttttatggccttgaatgtgatacatgtaatatatattggtgaatgtacaggtgagcttgagaagaatgtgtattctgatgttgttgggtagagagaatattccttcaatatcagttagatcaaattgattggtattgctgtttaaattaaccctttcttactgattttctgcctttttgatcaattactgaaagaaaggtgttgaaatctccaattacaatatggatttgtctattccttttcagtccaaccaatctttgttcacatagctcaatgctctgttgttggctgcatacatgtttagggttattatatcttcttggagaattaattattttatatttctataatgcccctctttatctgactacctttcttgttctgaagtctgttttgtctgaaaataacatagctagttcagctttgttttacttggtgtcagcatggtgtatctttctccatcccttatctttaacctgctctgaggctttatatctaaactctgtttcttgcagacaacatagacttggatcctgttttttatccactcagaaaatatttggtttttaattagcatatatttatactatccatatttaaagtgattattgatagagttgaattaatatctaccgtttttataaccgggttctattcactacatttcttattttgttatttgtttacttttccccttcatttctgctttctctggttttaactgagaacttcatgattctattttagcttttcttttagcatatcaattatatttctttaaaaaatattctagtagttaccctagagtttgcaatatacatatttaagtcacgtaagtccttcgtcaaatagcactataacacttcttatgcagtacaggaacgataacagcatagtcccaatcctttctttccttcccttattaaattctcaccattcatgatttgctataattacccaggagattatcactattattaccttaaccaatcacatatcttttagataaattaacaagaaaaaataaatacttcattttttccttcatttctttcttctctcatgtccttcctttcttcatatacaaatctgagttttcatccacatgatttccttatgcacattacttctgtgttttgtctgtttggttggttttagataagaggccttgttctttgttctgtcactcaggctggagtgcagtggtgtgattatagctcaccacagccttgaactcctgggctcaggtgatcctcccactgcagccacccgagtagctgggactacaggcatgcatcaccatgcctagccatattacttctttcaacatttcactcaagacaaatttactgtcagttgattcacttcatttttgtttgtctaaaattgtctttatttctccttctcttttgaaatatcattttgctggataagaatgctaggttttctcccaacaaacacttcaaatagttcacttcattctcttcttgcttgtatgatttattttagatgtcctctgtaaatctcgttttttaataggtaagatagcttttcccctggcttctttcaaaatgttctctttgtctttgtttctctgcagcttgaatatcatatgcatagctgtgtttttttaatatttatcctggctggtgttctttgagttttttggatctgtggtttggtgtcttttattcttcattttgtatagttcttgtcctttattatctcaaatatttttttcttactctgttccttctccatctgatattttaattgcatgtatattaaaccttttgagttatctcataatttttggattcctgttctgaggtttttttatttcttttttcttcttttcatttcagtttagaaagtttctatttatttatctctgaactcactgatgcctgccctggccatgctcaggctactgatgagcccaccaagggcattctttctctctgttacagtggttttgattccttgcatttacgtttttatagtgtctttgagtttttcgtggtttttatatctgtgggtgccagaggtgtcaagtttctgaaatgtcctcagttttgtctctactggtggcttggtcttccctttggacttgtgcttagaaagaatctgcatcttgcagctctttcagctgtaattctcttatatcggatgcctggtacttgtaggaagttgagaagcattctaaaatcttatgattaagcttttatgctgaaactagcttctgaagtccattgacgattaattcttgaagatcgagctagctttgcattcctacaattaaaccaaacttagtcatgctgtattttaaatacacacacacctacacacaaatatccccttcatgtgcaccactctgggactggtctagcatcctgtctatgctagttgtttatagcacagatgaattatttgctatgtttctttggatgttggctgcacaggtgctgcttgagggcaagtcagagatgtgttgatttatatcagaatttatggctttccttcaatcctcttccatccagcattccccctctactctccagcctccaaggaccttcctcccagttctctgtagaaaacaatggtggtactggtggggagtgatcagtgtcttaactttccatgtttctaacttgctattgcatgactgtggccatccttgaagcagtgccagagggatataggaggaagaggagaacatttttcttagactctctggcttgctaaggccccttctcctggtcctctggccagcatatgggggtttctcttggagtttttggtgcccacatctgtggtgtagtttagcaactggcgccatccaggaatcaatgctgggagagaaaacatgaaaaacgaacaacaggttgctttatcatgtttttctttccctacccatccaacctactagtggttcattttagttcctctggtagcagtaatttgtactttctctataattttacatttaatccctgggagaaagtggctataatatgattactcggaaacttctttttctgaatcagatatttcaagagtgatacagaattattttaacaccccaagatctacaccattaatatattaattatctgcttccagggttaaaagtggtaaagaaaattcaacaaatgcaattgggtgagaactgtaaatttttattgaaaagaaagttaaagagccatcagccaattctgtctattttttctaaggaacaccaacccccggatcacatcagttagaaaagcagagaaaatattcattgttaaatttgtcttcagggatgaagtcttgggcattagagagtccacttagttctcagtaaaatatatattaaagagaggatgcataattaataaataagatatagcttatatattaccaaaatatcactcaatttaaaatatcttttcgaaatgacaaaattgccctaaggacatgtaaaagttaattataagaaaacacaataaatcttgaaggataaagaagattgttgggttgggaactagaaaaatgtgtgcctcaaaccccaaatttacaaatctcttcattgttagcaatggatcaattactactggttatagctgcatacacgtgcacatttacacacacacacgctcattcactcaaaatccattcaatacagaacatttctaaataaagtattaatttaaaaaaacacagtatggtggattatgcacctaattatgccattcaacagataataaaaagcaattaaccaacagaaacaaataagccaacaatgaacaaaagctcctgctttgcttcccagagactggaaacattgcaaagttaaggctggaaagaggaattggaaagtggagcaggccgcagcaaattttaaaccagacattttaagcctcagctgccttatgaagtctcactgcgcccaggagtagatcccctcactaagagaatccctgggaggggttgtgctctgaagaccaaactgctagttcatttctgtatgttcttgggacaccataaaaataaaaacacaacacacacatgtaccacacacaatgtaaattattgttgcacagcaaacagtaaaaagaagttgccagtttataaaaaaaacaagtatctcattttattctttctgagattttaaacatatttatcaacatgttctattttaaataaagcaaatggtcacaaatattagatgtgttaagaaaataggtactgatatctaaaagtgagatctacctaccctcttcatctagatgttggaaaaattttggaggagaaaagggctcttctgaattaactgagagggaaggactcataatctcccctgaatgtgctaatgaggaccagggactggcctgtgaattgaaatccaggtttgctctccagtttcaattctctgacctttaagagccttttacttaagctgctcaaaagaagaaaaataatctaattctcatttttttgcctttattcaagcagcttattgatccagaagtaaaaagtaaagtgctttctagggatctggtacaagggatttaataacatcacaaaggatctctgggattatagatctaagaagagagactgatatttaaaaataattatacaataattctctgattgtggcagtgacagccatcaaaagagtgcatagtgggaaaagaaaatactcaaaagaagacttaacctagatcagaggtcagggaagtctgccttgaagaagtgatatgtaagtcaagagctaaagggtgtgtagacaccattgaatctgaaggatgaggaagagaaatactgagcattgcccctgtcaggaaggcagtgcacgtgcacacagacaggccaaagactggggacccttggaggaccacgctgggacttccaggacacatacatagggaaaatatttactttaaatttatttacattagttagggatttttttttttaaattgagtaacttctattttccagtcactattctggctcctgtattacagaagtcaagacgtgcctgcctcgtcctacttgggtacctctgcgggtatgtctatctttctggactccttatctgtaaaaaggggataactaattcacaggttgtcaaaggaattagaggaaggaaatatttaccctctccatggtatctccccactgacctgaatcaccacctggttcttgtccaggcgctactatccacgctcccattcaaggccaatctctccaatgaagcaccaagttcaccgttttcagcctgcctaaggtcatgatttcagccatagcccctcctgcaactgtttttcctctccaggaaattaatcccattgttttttaagattcaggaccctcctttcatctcccatccttcccagtgagctccccttctttgtttccctttgagtaaaaaccctagaaaataccatcgccaagcttctcccattccacttcaaatatccccatctccatgagcaaattcaggttttgtgggaattgaaattttacagtttggggagaggtgctttttaaaatcaatagtagaaaattataaatataaaattaggtgtaaaagtaaatatttatttagaacgagaatataaatcataacaaatttcaaatgttaaaatgctggcaaataacataatcatcactaaatccagaaaaatagcattcagttgtattatttaatttcctgacacttctgtgacacttttatccttgcatcttttcattggacaatctttgattacctcttcacatgacaggagattttaatataattttctttggagagcctagaaagataatccaacctttcctctgtcatggctgatcaaaatttgtttttaactattaagagtttagaaaagtttcttttcaattcactttactggtaatatcatataaatttttactattattatcaaattcttaaaaagcctctatcaaactcatgtcaaaaagcctcttccaaactccaagctttggaagaatttttcacagattggcttctggcttcacacattccaattccttttcttcctccactacccatatgcttctggtactggtgccacaggatatgcttgtattatgagacaacctctggtcctgccccttggacaagacacctcacaagtggacactgtggaaggaaatcattcctgacagccatgcctacccagactcccagcaataactaaactccacatgaagtgacttggtggtcagctaaatgtgttcccgagtcaacctccctgtcactgaatcccaaaatgcctcatgaccctgctcaaataccaccaacaaagtcaaatgggaataaactgaagtcttgaagtcttagctgtggttgaaatatctttcttttgcaaatattccaaaatttgtgaacacatcattagggcccctcccagagccttggaaggagtccaagccactgaggggcctgagatgtgtatctgcattcttggggaacctgctgtggaaagccccatctcacgctctcagcagagtgccagacagtgggtggggcccttgtggacactcactgtgcttaccctctggattcttattgcacctctctagtcctcgtttctcaggctctactgttctaaacctctcaacatggggtacaacaaggctcagaactcagccctcttctttagctacacagactcctcagggaatggccagtcacatggcttcaagtgccatccataccatgataactcatacaatttcatttctagccctactccctgactccatttgctgataatcaagtatctcattcacctcttcccttgatgactagtcagcatttcgaacttaccatgcccccaaccagattcttcactttccccacaaacatgttactcctgcactctctctcaccttgggaaatagaaatcctttctttgagaggcaaaggccaagagccttgttcttcccttgcatcctctctctgcagtccatcagcaaagtttgccaagtttttaaaattcacccaggatccaacgaattctctccacctctctgctgtggccatggtccatatacccataatccattttccattttccatgggtggctgtacatccctggataggtctccctgcttccaccgtgactcccaggctctacttcttatcacacagtagagggatcctgttaggatcctaccttaacttgaaatccctaggctctcaacttcctcagaggaaaagccaagattccctgatgtcccctgaggccatacactgtctaagcccattcccagcctctctctgccttacctctaatcatttttccccttgctcatttcatcctagatagtgatgatctgttttcctaaaatgtaagttccatgagggcaaggaccccccctcacttcataccttatcagcagcacccaccatgcctggtacgtggcagaccctcaggcaacctttgcaaaaccaagacatggacagcatttgataaaagcccagcccatggtatgcattcaatctatgtttcttaatattactactttcattattcccatcatcaccggcaaaaggatttgaaaagagaaagaaaagagtaccattggctctgtagggggccgcctccttcctctcctaccctccacacaccatgacaatgacatgatattaatatccattgtgccttttccacaaagtagattcaggtgggtgatgctaaaagaaaatctttaactaaagactccacgggtgtcaagctgcagttccttagcaggctactgactaaataatatgttggcccttaggcaaatattcaaactaaaaatccttcagcaggatgtccttctgttccaagaatctcatcttatctccaaagaaggaatgttacaattagcaattcagaaactcttttacatcttagtaaccatgcataaaaattaattcaagcaaaacctaatttagaataataataacatgctttcctaatgtttcctacattaatcatggttaagacagttactatagcagcgctgttggagtttattgaaaataacgtaattcactgtgttgcaagttctcttctgagagtgctgctgtttgtttaagcaggatagaaagaagtaaggaggcatcctctttcctttgaactaatttgaagttagatagcagacacagacaaaagtaataaagtgttgtttactctgaagtggggggtggtgacctttgttttttatgataagatgagttttaaatttgtactctcagtctcatctttttgctcctatgcaggaaaaagaaatacgggatgatggagtcaagttcaaagaggagggaaaataccacgcatgtattgtggctgagccactccctgtctttttttatgttttttatgattagatgagttttaagtttgtactctcagtctcatctttttgctcctatgcaggaaaaagaaatacgggatgatggagtcaagttcaaagaggagggaaaataccacacacgtattgtgactgagccactgcctgtcagaatgaagtcaaccctcacttctgtcttttgagttttcccaaggagccaaagccagccttgaaggtcacaatgaggggtcaatggtcagaagaagccaatgaaaagaatgtcagaaattggaaaaagtctagaaaagcataaacagcgcttgattgcactagagtttcctcatatattcaacccaaagcccttgggttctggtattcacaacaatggctggacccaactcttcctatgctcagccactcttcagctgccattcaggcagccacctgtgtcagatttccatgcagggtacggacattgctgatgttgttgtaggtttctcttagcagaatacaatgagtcagtgcagtcggacagacctgggctcaaacctctgctatgccataaactagctgcctcatgtctagcaaatcacgtgattcctcaggagctgtttattccactgtagcaggatttctccaccttggcacttttgacattgagagctggataattctctcttgagaggctgtcctgtgcattgctgttaaatacccaacacatccctgctgtggggtatttaccagcatccctggcctctgcccactagatgccagtggtgcccctatagtattgacaataaaaaatgtctacagacattgccacatgttcccaggaggacaaaaccaccccagttgagagccactgaactgtaaaatagagataaacagcgtagctctttgttacagatatgaaatgtggcaagctgccccggatggactgggaaccccatgagggcagacatcatgcaggatgtgcttgtggaattaatgaatttaggaaaaaccctcaggcattgagcacatcctttgatatgacgattatgaaaagcttctcttccgctgattagaaaaaaatacacttctttttctcaaaaatacttaaacaccacgatttcacagttaataaaatagaagagctttgtcttggaaacctcaccaccattttcacaaccaatgggagaactttggtccaggtcatatgaagaactatgttttcagtcaaacttttgcaatagaagcaagacaaatcaggcttactcatttctatcaaaggcatctgagttaacacattcctagagggccttttctataagatatttttactttcatttttattctcatttggtagacaggcctttccactctcttgcatttccttttgctttttttctttttgtaagtcccagaacaatttcaaagacagcatttgcattctccagttcactgaagacatatttactttagcctagcaagtagtgcacatttcaaatgttgactggtcacacgtaaaaaccaaatctgatttcctcctgggttctgttactgaagatgctctgccttcacttaatcccatggggattggtgttcaaaaatgtttttaatatcagctatgtaaatatccattctatccttgaattttttaattaaatgttttattttgacacaaatgtaaagtcgcatgcagttgtaagaaataacccagagagattccctacactctttatccagttcctgccaatagaaacatctttcaaaactatagtacaatatacacctgaatattgcctttgatccagtcaaaataaaacacttctgcctttacaagaactcttcatgttgccttttgatatgatttggctgcgtccccacccaaatcttatcttgaactgtaatttccataatccccatgtgtcatgggagggacttagtgggaggtcattgaatcatggggacggttaccctcatgctgttttcgtgatagtgagtgagttctcatgagatctgatggttttataagaggctttccccccactttgctctgcacttctccttgttgccaccatgtgaaggacatgtttggttccccttccaccatgattgtaagtttcctgaggcctccccagacctgaagaactgtgagtcaattaaatctctttcttttataaattatccggtctcggttatgtccttatagcagtgtgagaacagactgatacacctgttgtagccacaccatcttctctcctactccaacccttcttaacccctgccaaccattaatcccatctctatttctatgattttttgtcacctcaataagtgtaatggttaattttacgtgtccacttggctgggccactgggtgcccagatactttgttgaacatttatttctgggtgcatctatggagttagcactatggagtcagtagaggagtaaagcagattgctccccgaggtgggcaggcatcaccctattccttgaggggctgaatgaaacaaaaaggaagaagaaggaaaagttcactctctgcctgactgcaagagctggaataaggctcttctccgtccttgggctaggacttgcagcatcacttcttctggccctcaggccttcagctttggactggagcttacaccatcagttccatgcattctcaggcctttggtctcacactggaacttacaccatcatttctcctggttctcataccttcggtctcagactggaactacaccatgggctttcctggatctccagcttgcaaagggacattgtggaacttctcactctccataattgcaccagcccattccttataatacatcccttttccctctcactctctgtctctcactttcattctgtttgctggagaactctgactgatacaagaagcatatataaatggaaccattcagtatgtaaacttgggggattggtttctttcactccgaataattctctggagattcgcctatgttattaagtgaatcaacgagtatttttattgtttagtcacattctgtgctatggatgtaccatggtttgtttaaatcattcacccaataaaagacatgtgggatgttttctaccagtttttagttatttattatgaatgaagctatcatgaatattcatatataggtttttgtgtgaacataagttttcattttcctgggataaatgcctaagagttcaatgactggctgttttcaactttcctccttgtgttcagttctcggaagtttaattatgatgcgtttggcatagatgtttttaaatggatcctatttgtggtttactcagcttcttgcatctgtaggtttatgtctcttgccagactgggatggtttagccatgatttccttaaacacgtttttagctctgccctgttttccctctcctccaaagattccagtgacatcaatgttagatctatttttaatagtctcatgggtgcctgaggctctgtcatttttgtttttaatttattttttctctgcttttctttggttctttctgtttactattttcccctttcttctgcattctgctctttagactatacactgaattatttttaatttttgttatcctatttttcagttctccaatatccattttgtccttctttatatcttctatttctttgatgagacatatcatgtcttttctgaggcactctccttttgctttgtttgtatgaggtgtatttgtatttgctcattggaggattttattgttgcttctttaaagactttgtcaaataattctaacatctttattgtctcagtgctggcatctattgattcccttttctcattcaatttgggctgttgttttctaaaacttttctctagtcataggcttctgctttccggattctttggctagagaaagcagactttgaagggaactttgtggtttgcacttcgtagtatatccaggttgctggcttctccagcacctagcttgggatatatgggacctgtatttgtccattttcatgctgttgataaagacataccagagactgagcaatttaaaaaagaaagagatttaaatggacttagagttccacgtggctggggaagcctcacaatcacaatcatggtggaaggcaagaaggagcaagtcccatcttacacggatggcagcaggcagagagaatgaggaagatgcaaaagaggaaaccccagataaaaccatcagatctcatgagatttactcactaccacgagaacagtctgggagaaactcccctcatgattcagttatctcccaccaggtccctcccacaacacatgggaattatgagagtacaattgagattcaggtggggacacagccaaaccatatcaagacccatagaagacccaaagaagtgtcagtgaccatgctgttttggggggatcctgagttcctaagtggtctgcctctgctatccacctttcagagtctccttgtactcgatatatacatgtgtgtatacatgcgtgtgtatatatgctatatatgtgtatatatagtatgatatatattctatatactatgtatatactgtatgattataaaagtatatactatgtatatgcagggaaagtgtgtgtgcatgtgtgtgtgtacatagatattatatatgtctcccagggttttgactaaacttagcaagatgaattagatacagtatgtgtatttcctcctcctggaagcagaagtctggcaatattttaacacagtcagtgagacagtacacacaggtataatcaatgcaaagactagctccgccatgagcttataaggtaattaactattccgagcctcagcgtccacctctgttaaaggagatcgtcacagagcctcctgcttgcaatcattcccagggacaatgtccctggaatttagagtgaggctcaccctgtggctctggttagtcatggccatgctgtctcgtgcataggaggtatcttctctgcattgagcagctgttctttcccagagtgctgctgggcaggaaagtaacagatagagatgaagtggggatgcttacagcaaagaggtccattttgttcttacttggtactggcagaatcagtttagtggactcgaagtgggcatcgcctgggagctggtgagaagtgtggaaatttagggggcaggagggggaggaatcagaacctgcattttaacaagagcccaggcgatttgtgtgcacgccgcagcttgaaaagtgacttcagggctgggcgcggtggctaacccttataatcccagcactttgggaggccaagacggacagatcaattgaggtcaggagttcgagaccagcctggccaacatggcgaaaccccgtctctactaaaaatacaaaaattaactggaggtggtggcacatgcttgtaatctcagctacttaggaggctgaggcaggaggatcgcttaaacccaggaagcagacgttgcagtgagctgagattgcaccatttcactccagcctgggtgacagagtgagactccatgtcaaaaaaaaaaaaaaaaaaaaaaaaggaaaatttaaaaaaagcaaaagaaaactgactttagagagtgggcaaatttggaacccctgagggtttcacagcaggcacaatcctcccgcagggcaaacagcagctcatgcatgcatgtttatttttggccaccaggaaggtgaaaaagcaaagcagaggccaagggaaaactggcaggggacaggcaggagaggcccatgtcaggaccaagaatcccccgtgaatcagagacacggaagggcaggagcagggggcaggcaggagaggcccatgtcaggaccaataatcccccatgagtcagagacacgggagggcaggagaagggaggcccgtcatgggagctgcagattctcttgctgtccctgcctccatctcgtcttccccgtgcagtccccattcctttctcagatacatttgcattcactctctttactaccccctgcctagggtgggcttgtttggcagttagtgcagattcattttccacagtgaaagctcccaggtgacctttaggtttatcccagtttgcttgtggctttgatgtgaatgtgacataagtgcataggaagaagtgtctctccactggggagacaggggagccctcctgaacaacacagccagagggtcacagcattcgtaaaccccaaagactgaggatggatcacccatcagctctggttcaccttgaaaacggagacgggaaaacaactaaggagacaggagaatcctctctggcaaagcatcttacataagtaaagcagagagcaatgccctctgccctctgctccgaaacacagaggggagcttgggttgttgttcagaactccaagcgcatgggttttgcaggttgcaggagggagatagtcctgttccttgtgcagagaagatggctggaaaccacccagggattgaggaaatgttccctccttcctttgagtgaggggatgtttgaggctcataagctgaagaagtagtgagcttctgtgtccttggacctcagatcacccttggccagtccagataaattatacctccaaggcggtggtgatggtggtggccaagggaaaaaagcgtctgtggcaaacttgtgctttcctgcctggcttaaaaccagaaactggtgtgaacgacaggacagagttactgagcacttgctagcctgaatatgaggccagttttctttttttataagcaatgcgaaaaccctgactataaaatatgaaaataagacatcaaagaaagaacatgagtagaaaagaggtctagagacaaacaggatgtttgaacctaggagctcccccagaactttctcctctagcaattcaccccaccttcgcatttgacaatcgtgtgcaccagcagttgatgccacccactgtgtgttgtgcttctgggaatcaggcagagaggtctccaaggagccttctttgattgacaaattcaagtggcctaatggtgtcacatttggtttgaaccatttggaagtttaagctgaaaataaacttgccaagttctcatcacacacaaagttaataatattcagtgaaataattcagaacaagatatgattaggaaaaggaattcccaaaattgctgtgtaccattgccacatcatattctgggtgtattagtctgttctcaggatgcagataaagacatactcgagactgggtaatttacaaagaaaaagaggtttaaaacaattctatgtggctgggaagacctcacaatcatggcagaaggcaaaagtcatgccttacatggcagcagacaagacagaatgagagccaagtgaaaagggagaccttttctaaaaccatcagatctcatgagactttttcactaccaggagaacagtatgggggaggacccatccgcatgattcaattacctcccactgggatcctcccacgacacatgggaattgtgggagctacaattcaagatgagatttggatggggacacagccaaaccatatcactgggcccttccaaaggctctaagttaaaaaagaaagaaaaggcacgataaaaaataagtttgaactggggagaaaaatgtggaggacaaaagaaaaacatacgtccaagatgcccctgtccttggcttatgtcatgattttattttcctggttgtatccatttcctagaaatgtatgcatttctaaagtaatgattcagccacatgagcaacttctcagtaacccagccttggctcctgtattggtcagttctcactgctttaaagaaatacccggccaggcatggtgtctcacgcctgtaatcccagcactttgggaggctgaggcgggtggatcacgatgtgaggagttcgagaccagcctggccaagatggtgaaaccccgtctctactaaaaatacaaaaattagcaggggagtggtggtaggtgcctctagtcccagctacttgggaggccgaggcagcgagaatcgcttgaacccaggaggcagaggttgcagtgagccaagatcatgtcactgcactccagcctcgtgacagcgagattccatctcataaaaacctggaaccgcctcccaggttcaagtgattctcctgcctcagcctcccgagtagctgagactacaggagcgtactaccatgcccagctaatttttgtatttttagtagagatggggtttcaccttcttggccaggctggtcttgaactcctgacctcatgatctgcctgccttggcctcccaaagtgctgggattacagacgtgagctactgtgcccaaacagctactaccctttttcaggagtggtgggaagggagtaggagctttggtccaaagatgaagtcctcactcagggcaccacacacgtgatcagaagctgcaggtcctcgaatgtcccagctctgctggtagtagctgcccctctgcacccagccttacctgagttacagctgagtagaataaatctttcttgagaactgtctcgcaggtgttggaacatgatctttgggttcagacacacctagattcaagttctggatgcaaaacacatgaaaaggtgtgaatgtgggaaagtcatcttatttaaatctgtttcctcgtctgctaaataatatagttttgattttagtgtgcccagcatcctgccctcttcatgtgagaaaaacacgtgcttctggttaggaaaccatcaccccaataccacatgggcttaataagctaagagccgcactggcccagactcctactttgcaggtgataccaattgctgtttggcatggtttgaggcaggaaattaggagccattaacatctttaactggccttgggctacaaaactccctttcattaattagtattgaaagaatcaacacaaagctatccaaaatgctatcatccttaattgtggcatgtaagacagactcagatacccagataattctaacagactccatgcatttcagcgtagtaatgatttttagcaccgaatacagcctggataggatgaagtctattctttctgtagattataccactgtgtccctgcttctgttactgagccttaaacagagtcactggaaactggtaggcatgcactcacctcaaatataccacagctctcaaagataagagtcatcgctaaatataaacaaaagtaatttgtacacagtaactaggactcttcctggaccaggttccacacatttcaaggttctagcaaaggttctattaaaggtgacacatttgttacgacacttttatttacatgctaaataaatactttgttgctccttagtcttcagaataaccacctttcagatgtttgctgaaaaggtgaataacttagggtttattttgagcatgatatgcaacaattttaagtcttatctaccaaatcacctctttgtattgacaaactataatcagccttcaaaataaacaagggcacaccttgaacagtaatgtgagatgcaaagccttaatttcccatggttagtggtgaataaaatctctcagttatgaataggtaaaacagcagggccacttaaatgtgcattttcagcttggaggaatgtagaaaaatgtccatacaagatagccaccatttttctccatttcccacctgcatttgtgaatcccttttctgttaacagtgaagaaaaaacattagtaaatatctatgtttctgcgatctgtgtacaaagttccaaaatcttcaaaattcacatatagagcatcgtattagagaaacatgagcatgggaggtcatggaacagcacctgttctatcagaaggaaggcacagaagaggagggcttaggcaacccaggtgtgaggggggttctccaagaaggtagcgattctgcaagcccctgcccgctgctttctctggggttgagctaaaaggaagttcaaaccgaggaagaacccatgactgcaaatttccaccttttgcttccttggggctatttccataaagcaaaatcctctctgatgaagtttattctccaggatctgccactcctggtaggaaataatcaaagattgcaaagtctctgcaaataattattattcaaagatattagtggcaaaccaggtgagccctgcattcagaaacgtgctgttgatttccatcctcagcactggcaggtagggaatgtgagcgcattacgtaacctgtaccaaccggggtttcctgctcagtaaattcaggatcagattcctgtgtagtgatgggatctctacggggtttgattaagaaataggtgtaaatcacgtggccgggttctcggggtgtagtaagtcagtgagtgttagctgtcaaagaaatgcccctcaccacttttccacgtacaggagcccattcagatttgagaggatccatttccccagaaatactaccttctattcccaagtaagacctcaacacgtaacacacaacttccaggactgccaaagtaagcattgcaagccctttcatgcatttatccttaaacatacagtaatttgtttttaataaggaaagctcactcccttataaacagtttacagacagcatgtgatggaataaaagttgtggccaggagggagatggacttttgctgccacatccctgcaaggtaacaagaaacattaaaaatgcatttggtcctgataggttgaatccattttaaccggcataaataggacagatgagctattcaaatgtctgaagagcccatataatgaaatatggatcatattctcatggctctggcaggaggagccgataatttgttttctctcagcattagtagtcagtggcacccataataaattatatattgcaagttcatatcctgcacccagttttatttacctatagagtctgaaatctcatttatcaaagtttcagatggggaaaaatatagctttaaatttataatctttaaagaatcctgaattgataatatgtacattttgggggtatgggtaattaggaacatattttttaaagttttctggtattattccattgtaatgactgtttaccaatggtactttctgtttttaaatgtgaagatgtatggaaatcggctgcttctaccatttaccttcacgataaaacgtggaatgtttagactctcctaagctggagtggctttgggggtgaattctgactggaacaaaattccgcaccccttcctaagtgaagacattgctgggtggattttatttcatggtgttcctttggaaaccccaaatcagtgggtttttcctttacttcaaataaaactcatctctgtctgacagactctccagatccccaatatgtaatatatggctatggatggattttctcattttcctctctagagaactttggagctctttctctgacaccctggattttccattcatgtaaaggtgaattcttaagtaacaggactgaaatccaccccgaggtactgtaatccgcactcctctgcacctctgccagctctccctgcagcagctttccctagtgcactgggcaaccttccgagcatcccttggaggccttgtcccctcctctgggcatgtgccaggcatgggtcctgtatggccagcacatcacatatcatgagcgtgcgcagctccgggacttgcattcttcaccggctgggagaagagttaggcatttttgttatgttcccttttgagtaaatagatgtctttttaaaaacctgggtcaatattgcaatatcaacttccttgtcagcttctctcccaacaatgtttgcaagggagaaaaacacattcagcatttacagcaaacataacaaatgccttctgtcatcattaatgcctactccccacccatcatctatcagttactgagaacctcagattgcctcccactcttagaatgactctttgaacactccttgttttctgcaaccacggcccctgcatgccaggccaccattcttgctcatcatagcttcctcgtctccgaattaacccactcaaacgcctgcatgggagccttactgaggtctttgcaccattctggggtcctccaacccattctttatcttctaatcaagtcatcttttgtaaacatcaatctcacaaagacattggcccaaaatgcccttaatggcatcccaaaagttttgaattctttttatggcaccaaggcctgcctgttcctctgattaatatttattctcctctttggatgggaaactccatgaggtcaggtgaaatgtctctcctgttccaagctacatcgcctaccctagtgcaatgcatggcatatggtatatactcagggtgcgctcggccatacgtaataaatacactcacttcacacagatgtctgcctactgcagcttcagcaaaacactcctaaaagaatctaaatgagtgtaaacacctttagacctcagctaaaatgctattgttggccatgctcttagctactgtgtaatgctgtctcaacaattcacccaacagagagtagagtccaacaactcaagcagaacacggtttgccagccagtcaccttacccaaaacgcctactctgtagggttgctctgaggtttagaaataaaatgttgaacataacgtctagcacacagtggatgtccagtcattaatagcggtcattacaatgatgcaaatcaaggattttaaagtcgtgcttggtaaaatgaggtgatgccattgagaaggcagcaccggaacaagaattccgattggctgaaaacccaaaagggaataggattttttttttttagcaggcagggtctttctgaatgcaggacatcctcagaattcagttcatcccatttccgtggctcaaatcctagcccaaacacagaggaaaaatggtgagccaagagactgcagcgatcagctggcacggggcagtctcgcaagggagcgagcatgcatttcaagttctccacgtcatttccaatgtgggtattcatgacctagcagaaaacagaaaagacattccaggccttgaaaatatgcaaatcaaaacaaaacaacccatccctcaagtggcctgtcaataaaatatccaagtttggtgttttatttgtggaaagaaacccaattgatctttccccaatgactggggcagccctggcttctctccacctgacacccatggcacagaacagagatgatcacagctccaccccacttcacttgcactgatatgtgggaaaacctttcaacagatatcagtacctttcaatttagaagcagtcaactctacagattgtgttgtagacagtatattttctggacttagttaacattgcctagatgcctagataccaaatttggtgaaagaggctttaactctcctttcctttctttttgaaatggcaggatgatcaggtgccacccccaggtcacaaggccccgtccctatttttccatagtgtggattcattatcaagactaagaagcccgttgcctgttcagaaactaccaagttagtaattacaacgtggcttttttcccctcatgttttacttgaacaatgtgggaggagataaaagttggtgaacgttgtttgatattttaatagaaggattgaacacacatctcagttttttatgccattttgtcttgcttgcgtatgctgtgtaagggtcaaccattaataaaacatgtaacacactaatggcccataaagagtatactttgttgtaagacaacaggcaaatccctgtctttgcttaaaccagtgctctcaaagaatctcgcgtcttttattgtctttttataaagatattttcatcaggtggaggaagggtgcttagatgttcattgttttaaaaagatagtttactcctttaaaagaaaacatgctccactccattctttgacttgcatttgagaactgggggttctctgagcgtgggggttcctggcggcttctctgggaagtgtctctgcccttgcccactgccctgtgtcacattcttctattgttacctgtcaatatcacctgtcccctacctgagcttctcaggatatggcagcacctgttcacaagtgagagggcaaacctgggctggtattcagccggagtcccagtagatggcactgttccctctgactttgcaccagcctggatgagggggacgtgggcagcaggggagctgacttctggggtctgcctgggttgcagacagaagaaagaaggagacacgcaaaccacaactggacgagggcttggaaatgtgaaactctccctgctgtgatccttgcaggatgaacaagtttacggtatcttacttatattgccaacaaataagatcagaaatgttgcccaagggcaacaagaggagattcagcaaagcctttatttaagaccatggtttcctgaacaagcatccctggctgagatgatgtccattctttggagtcagactcttcagaattccagctctaacccaggctgatgagatgcaccatgtaccctttggccttagtcttagaagggagaccttctcacatctacagtggagatgtaaatggtacccacctcttccggtgcctgggaagattagatgagatggtttcccaggaaactgtaagaagtaaccacctactatcagcacctgcatcattttgtcatggttattactgtgattattatactccttcatacaaatgtcactcgccttcttgccaggtgccaggatctgaaattggcacaaagaaatcacagctattatgacatggttgctaacttctggaaataaacaaataggttttttttagaaaaaggtaagtaaatataacaaaaacatcaaaatggcataaggaggttatgaataaatgccaacagaaggacacaggtggtatccataccggggcgagggaagggagagtggcaaaggccagagaagccactgaagctaagaggagggggagagaattgattaaaatgtatggagaggaataaggaggttgttggtgacgactggggaaataaatgtgcaaaggaaaagtgggaatcaaggttaggccaagaagagggaggaggggaaacagcttgaagctgcccaagaagggctttgagcaacctaaggctcagggttctcctggggctgtagactttccttatggagttttgcatcctagctcccatcatatgtgggctggagagaaacacagcccccttcacctacaatattctgtttctgacattctatgtacatgagaaacaattggtttcaccacaatttcttttttatttctttttctttttattatactttaagttctagggtacatgtgcacaatgtgcaggcttgttacatatgtatacatgtgccatgttggtgtgctgcacccattaacctgtcatttacattaggtatatcttctaatgctttccctcccctctccccccaccctacaacaggccccggtgtgtgatgttccccttcctgtgtcgtgtccgtgtgttctcattgttcaatttccacctatgagtgagaacatgcagtgcttggccttctgttcctgcgatagtttactgagaatgatggtttccagtttcatccatgtccctacaaaggacatgaactcatcattttttatggctgcatagtattccatggtgtacatgtgccacattttcttaatccagtctatcattcttggacatttgggttggttccaagtctttgctattgtgaatagtgccgcaataaatatacgtgtgcatgtgcctttatagcagcatgatttataatcctttgggtatatacatagtaacgggatggctgtaagaagaatcaatatggtttcaccacaatttcaaaccagtcttgtgggaggggaagagcagggatggaggttcctagttcacaaacaggaaatggacttgtccaaggctggacaaaaatagagacagagttgagtctgcaaccccacagccatttcaattgcatgactctctcttaatgaacaagtttaattaaattctcaggtaatgagaagacactggcagctcatgggctcagggatgaggagacgagaagacaggcaggaggcagggaaagcaggagtctcacaggcaggaagacaatgaggatgccattgcagtgatgcagtcgcacagaggagactcgtgccaggtgggggcagccaggtggagcagaagaaagacattcaggaagtacaaacaaggtacaagtggaggcttggtcactactggattcagaataaaggacagaaaattcagagatcactcagagcattggaacctggcccttcacagtaaagtctgttcattaagactcttagtcagggttcttctgagggacagaaccaataggatatatgtgtatataaaggactatccaggagaactgcctcacatgattacacagcaaagtctcttaataggatatctgcaagctggggatagagagaagccagtaggggctcagtccaagtctgaaagtctcaaaaccagggaagccaacagtgcagccttcagtctgaggtcaaaggccaagagcccccaggaggcttctggtgcaagtcccagagtccaaagacagaagaacctagagtctgatgtccaagggcaggaggagaggaagcaggcatcctgcatggaaagcagagagaaggagaagactctgcaagttgtttgtccccttcttctgcctgctttgttccagccgcactggccgctgattggatggggtgggtcttcctctcccagtccaccatctcaaatgtcagtcatctctggcaacaccttccagacacccagaaacaatgcttcaccagccacctaggcatccctcaatttagtcaagatgccacctaatactgaccatcataaacacctaatccattgcttaggatttacttccaaatgctgacctttcatagcagagagggcagctgacacttaagcaggatgatatcaggtctctgcaagtcattctcccccaacacacctggctccttcacattttctccatgagattatgccaaatgatctcttatgtactgaaaatgtttctcatgtcaaccttacactgactattttttgaaaatgtagctttgtccagattaatgatatgcacaaaatcatagattggataataataaaaaaactttctttatctaatacaaattataattgatatgtgactcttcattaaaatattgttttatcgcttgcccttccccctccaaaactgcaaaaacaaccaataaaaagggaccactgacaatccgtatcccagacttaggaaggcaacagttcacaaaacagaagccagagttccatcttgttcttagtgtttagtgggaagaaaagtgggctgtttgctttgctgcagaacaaacaaaagctcaccttgtacttttaccacttctggagacaactttgtttactgtcatgttgtttctgatgcaaacacagcctgagcggctccagttttgcttttctcttgacctcatcattcccatgcctccagacccaagcttcatttttcagacagccctgaactggagtgcaccttgcagggtaaaggcagcacatgcatcctgcttgctgctgctgtctgcagctcccaaggtccatagcgcagccacagggcatcctcagcaaaaagagagccagggtttcttgagccctggcctgaagtatcatccgaatgcagacagcactgatgctttcctgttaatctcagcagagtaagtacctccattaaactaaaaatagttttaaaatagcatttgtagatagaatcttcaggttatgaagaaacttaaagtatcatctcaaacaagcttccagtttatgtttcagagagctgagtctgggaaacttcagacaacttacttatactaaatgccttccatatcccattctttgtattgaacttctaaacaactgaacttaaaaccactgattaaaaaataacttatattttaaaaataatgataccactcaattatatttagcttgctatgaaggtagatgatccctccattataaacatagaataaaatatttgggaaaaaaatgggtactgcaaaccaagtgctctcaagttgatcagaacctgtaactcagaaatttcactacttgacaactatgcccaataaataattcaacagaacaaaaaaaaatgcatatgtatgcatgtgtacaccaaaatcattatctgcagcattgtccttaacagtaaaaattatacataactgaaattattaggaaatgccctcagaaacgatgtatgttgaaataaaagaatttgatctattcattaagttgacgatataaaagctataaaaaagtaaaaatgcaagatggcatgctcataaaaattgcagcgtgaaaagcatgcactcacaatctgcaatagagtcagaattggatacaagtgtccaacaacagaggcccagttcagagaatgatgctccatcaactggatggacaaccaggcagcctggaagaaccacagagcaatgttggtcagcatggaaatcattttattacatcccactagtgaaataaagcatgccagaaaacagtgtacacactaactttgtaagaaagtatgtacacacacacacacacacacacacacacacacacacacacacacacaaacacacagctgtactccaaactcccagagaacaagaattgctaacctgttgttgggtacttttctttcttttttttcttgtgtatgtatgtgtgttcttttctgtgttcaattatctgagtggcgctcatgattgtaaaaatattattaaaaaataaactgctgtgataaaaatgttgatagctatttatttatctttttaaatatatatgcacataaatctcaagataggaaatgaaaatatttgtgctaatgtaatttcttaaaatcaggtatagagatttaatattgctttttaacttgtatttttaattaaaaataaaaatagattatatgcattttcttccctcttaaaaaaagccttcctagaagttctgattacgcataaacactgtctgcgtgtacatgtgaagcgcagataattttatttgaattaatgtggttaggcagcttcttccatgcacagctatcacaccacagtgaagcatccagggcatcaacagcacaaatcagtgaaatgaaaaaaaatattattgtactgtttaccaacagatctataattacaaaataaattaaccgtgaaatgaaacactttgggttttctgcaatattgttgtgagagactgggtgattctttttttcaaattaattctgagaaagcttgaatgtgaaatattgcaaagagtattatgtttttttattcttattttttatcttttttttttttaaatatcagcacatatcagtgtgactcagggacacactttcattttcaaagtcaaagctgcaagctaggtggtcactttgaagaagaggctgggacatgaaaaagagaaaaagttccaccaatggaaagcccccatcatctgcaggtgacaggcctagattggaagaatgacattttctttattctcctgtgaagccagaactctgagatctcacctcaggtccagggaaacaagaggaagaaagactgatctgcccccttccaaacagaggattctagtgtccagttgactgacatcaagatggccttgcaggggcaggtgctgaagccatctccataaactataaaattaatcagggcagaagggaggggggaaattaacacaaacgaagcttgtagcacactcagcattcgttattaggacagctcactctctgaccactgccccatcgtcgtttgctacctgttgccccagaatcacagagatcctgctctgtagataacaacgtaagcatggtgaaatgttccattttccatttgaggtcttctttcatttcctgcatcagtgaaatgactgatgtcagctggcctgaagggccccacaggaatctgactcatggaagaatgaatgcagtttccacatcctgatgatttcataccctggactccaaccaatcaatggtcccaattttcctgcctctcaccctccatgattccctgaaaactttcagcctaaagcccctcggggggacagacttgaggttccctcctgtctcctccctcggctgtcatgtgatcattaatctctttctttgctgtaaaccttgctgccttggtggattggtctgttagttcacaggaggcccaggaacctggaggtcctgtaaccgtgcctttggtgagtttatatgacacagagtgaacatacttactggagcattctatgcaagtatgttccaggaccactccctcccaaatccgtcctctttagaggtgtggcagtggacacaatctatcctagcaagaaactcagagtgattatgatgtaaatgtccgcatgaaaagatgtaaactagttcaacccttgtggaagtcagtgtggcgattcctcagggatctagaactagaaataccatttgacccagccatcccattactggctatatacccaaaggactataaatcatgctgctataaagacacatgcacacatatgtttattgcagcattattcacaatagcaaagacttggaaccaacccaaatgtccaacaatgatagactggattaagaaaatgtggcacatatacaccatggaatactatgcagccataaaaaatgatgagttcacgtctttggagggacatggatgaaactgcaaatcatccttctcagtaaactatcgcaaggacaaaaaaccaaacaccgcatattctcactcataggtgggaattgaacaatgagaacacatggacacaggaaggggaacatcacactctggggactgttgtggagtgaggggaggggggagtgatagctttaggatatataactaatgctaaatgacgagttaatgggtgcagcacaccagcatggcacatgtatacatatgtaactaacctgcacattgtgcacatgtacgctaaaacttaaagtataataataataaaataaaataaaataaaaaaagaaaagatgtggctccaggtttctttgcttctaagaagaaagtacataaaaacaaactctcttgggggaaaaaaatgcccaacttcctctctgaaagctcacagtgcatgtcacacaattcatcactttattcagtcagctgtgtgcctttttctcctctttttctacttaggttttactttttatttggtgttaagcttttaactttatgaggtgtacattttctgttataagcagaatgtgtgtggacctctattgtaccactatcaggaagaaattgaccaggaatgacatgtctgagttcagacaaggaggctgctcttatttaccaaatggccagcaaccctgcagctagggcatccctccaagggagtcatgccccttccaaaaaggtcgcgaaggagctcgccatgaacacaaaggtaacagcaacatcgtcgtcagagcagtttcggaagtgctcatacccaccaagggctgggctagtaatttcccctgcattgccttatgttattctccctaaagctcagagaaggaggcattatccagcaccagccctcttacctgactctataggaaacagttgccagtagcttagttgaaaaatcagtcaagatgagaaatcatgaagttacgcatataatctaaatatttcaaacgtgaaaatgcacatattttccaatattttgaaatgatcccaaagtcttaccttaagtaccgcacctctgattacagttcttgagtgtgttttttcatcctcctgtcaccaatcataatgcattgtcactatgtcacagttccagtgtctttatacacaagcaataacttgaagccatatgggaatgacctagagcaggggcctccaaccttttttggagccaggaagcagtttcgtggaagaccattttttccatggaccagggaggggggtggtttcgggatgattcaagcacattacatttattgtgcactttatttctattattattacattgtaatatataatgaaataataacacaactcgccatcatgtagagtcagtgggagctctgcacttgttttcctgcaactagacagtcccatctggaggtgatgggagaagtgcctcctgagtagctgggattacaggtgcccaccaagactgcccggctaatttttgtatttttagtagagatggagtttcgccatgttggccaggctggtcttgaactcctcaacttgtgatccacctgcctcagcctcccaaagtgctgggattacaggcatgagcctcatcgcctggccatggattacattttaacgtgagatttgggtggggtcaaatacccaaactctgtcactgtccttaatggtgtgtcctccactcacagcttttgcttccacacctgacttgacagcacttactctttggtgattcactttctgaaatgtttaactgagctttcacaaaaggaactctctttttgcattcccatttcattggtttatacagtatttagtcaaattacataattatgatgtgatatacaattaaataaattgatttaggaagaaacacaactgaatgtcattaaggagatcagacactgttgccggaggaatcagcctgggaaatggtgcgtgggctgcaggctacagacgctcagggtgcaggggtctccatcacatagtgacagagagaaaggagggggggtgctcatgggaaatcagttacaggagaaacagtctcaactgcacctctgtttactatgagcattagtgaggctgaagcccaaagaccccaaagcccaccagcccctcctctaggctctctgcatgctggccatggaacaccttgcatcctcagggtacctgaagcatctctccacctgcagagtcagttcctgaggccccgtggtgctctcattctaggacagcatcaagcacgttcttgggcagtaagagattttgagtaaaaaatggccatcttgccgtttgttgcctcagctctgaccttttgctatgagctgaactatgtctcctccaaattcatatgttgaggtcttaaaccccattgcctcagaacgtgactgcattggagacagccttgaaagaaatgattaggtctaaaggaggcctttagggtgggccctaatcccctatgactattgtgcttataaaaagagggaatcggggctgagcacggtggctcacgcctgtaatcccagcactttgggaggccaaggcaggtggatcacctgaggtcaggaattcaagaccagcctggctaagatggtgaaaccctgtctctactgaaagtacaaaaattagctgggcgtggtggcaagcatctgtaatcccagctactggggaggctgaggcaggagaattgcttgaacctgggaggtggaggttgcagtgagctgagactgtaccattgcacttcaacctgggcaacaagagtgaaactctgtatcaaaataaatgaataattaaaataaaaggaggaaattgggattcacagggagacacaggggatggtcacacagaggagagacctatgagaactcggcaagaaggtagctaccctcaggccacagagagacatcccaggagaaaccaaccagcaccttgatcttggacttccagcttccagaactgtgagaaaaatcagcttctattgtttatgtctcccagtctgtggtattttgacatagcagccctaggaaacgaatgtagccttccgagctgcattcaaaccgcagtcttcaggggctcttgcctggattccagaacctgtctcccaacaagaagtaggcttgctgggtgtgtagtcctgaagacctccagaatgagacacatctgggatgctggcttaacaatgcagactcctgggctccactctgaccttccaaatccaatctccaggacagagactcaggaatgtccggtgttaagaagcccagtgggtgattaccatgcccactagctttttgttcagtgatacattatatttgcacatatttatggggtacatgtgatattttgttacatgcatcaaatgtgtagtgatcaagtcaggatttgataactgaatcagcatctgaaaaacgatgctgattcagttatcaaatcctgacttgatcactacacatttgatgcatgtaacaaaatatcacctgctataaagacacatgcacacgtatgtatattgctgcactattcacaatagcaaagacttggaaccaacccaaatgtccaacaatgatagactggattaagaaaatgtgacacatatacaccatggaatactatgcagccataaaaaatgatgagttcatgtcctttgtagggacatggatgtagctggaaaccatcattctcagcaaactatcgcaaggacaaaaaaccaaacaccgcatgttctcactcataggtgggaattgaacaatgagaacacatggacacaggaaggggaacatcacattctggggactgttgtggggtggggggagaggggagggatagcattaggagatatacctaatgctaaatgacgagttaatgggtgcagcacaccagcatggcacatgtatacatatataacaaacttgcacattgtgtgcatgtaccctaaaacttaaagtataatagtaataaaattaagcaaacaaaaaacgagctcattctacctaaggatagatccctggagtcagagctcttaacctgcatagaccttatttgctatttctaacaagccactgggacctggttgtaacggtgacaatcttgaggctggagtccatcgcaatcacagctgcgcttggatcccatttctatgactcaccagctaagtgatttggcaagttatgcgacctttctgagccccacttttttaacttgttcaaaaaaaaaaagcatgttggaaatacatgggaagcacttatcacaatgccttgcacttactaggtacctggaataatagatatgattagattatacattataaaaatacaatggctacaacagttgatactggcataaggagaacagtatgaaatatagacaccatatgaataaaccctagtatacactttaaaaatcttttttttttttttttttttttttttaggcagagtcttgctctgtcgcccaggctggattgcaatggtgtgatctctgctcactgcaagctctgcttgccgggttcacgccattctcctgcctcagcctcccaagtagctgggactacaggtgcccgccaccaaacccagctaattttttgtatttttagtagagacggggtttcaccgtgtgttaggcaggatggtctcaatctcctgacctcatgaccagcccgcctcagcctcccaaagtgctgggattacaggcgtgagccaccacgccaggccaaaaatcttattttttaaacataactgcaaatgtatagaggcaaggatggtttgaaacaaaaggctaagtgcaggagcaaaatgcagcacatctttgtttgcaccaaagatgtcccaggaggaattataaagacagaaaaacattaggcaattgaagggattggagtgaacctttgtttggaccttaacagtgcagactaaccctctcattgagagcaactgtaaatgctggacaaatttttaggaaggaaggaaagaaggaagaaaggaaggacagatggacagacagataaataaaggaaggaaggaaggaaggacagatggatggagaggcaaatggaaggaagaaagggaaggaaggaaggaagggcagatggacagacaggcagatggaagggagaaaggaaggagggaaggaaggaaagaagagaggaaggaaggaaggaaagaaggaaggacatatggtcggacaggcagatcgaaggaagaaaggaaggagggaagtaagggagggagggagggagggaaggaaccgaaggaaggaaggaaacagaagaaagaaaattctttgagggcaacaaagaacaaataggacaaccaggactcaaaacccccagatgtgtagaagggcgttgaggagcacacatgggcttctgctctttccttgggatatttacagacgtcatttggggaaattgtggctgaacaggaagcaatgacctgggactgcagtgcttccttaagctgtgggggctgaggttgaagtttggtattcccgagtcagccagtacttgaggggcttagattctagagaagagggaaccacaaaaaagcgagcctggaaaattctgcactcaatcttctctcaaggcatctaccaattccttcttgaaacatgagacacctgaaatccaaatgaaaagcaggagcttggaggctaaacaactgagcagagtttttgagtctcactactctggaaacaggaggtagaagttcagggcccactctggtttggagatcctgctagactctgtcacacacatatgtaagacaaatatgtgacatgtctatatgcatatggtacacacacacacacagaccaaggcctgatgaaattgtctggtaaagatataatgagccatttgtagatttagacaacttattacttttgtcgacagcaaaaggaagcttacccaatggtaccggttttctgtggactccatcctacacactaaaatagatgccaacagaagaaaaagggtcaggaaagttgtagagcaccccattattgatgaaaattgagctaaaaatcaataacaaagagataactaaaatgaccgatatttgaaaaatagcagtgaatttcttaaataattcatgggttaaaggaactatcacagtggaaattgcaaaatattttgccctaaaaataatgaaaatgtagcataccacatatgaaatgtaactaaagtgttgcacagaggcacatttgcagccttgaatatatgcattagaaaagaagaaatgctggaaagctgagtatttatgtctctatctgaagaggctggaaaaaaaatcaaaattagatagaaaaagaaaaagcaaaaaagggaatgactatcaatgaaatagaagtgaaagttagatacaatcaataaagccaaatgttggttatttgaaaatattaataaaactgatatatcattaccaatatagttcaagaaaaaaatagaataatcagaattgaaaaaggggacatcatgagagaatctatggacattaataaagaaaacaagattaattgaacaacttcttgataataaatttgaaaatatatatgaacaaaatttcttagaagacacaatttaccaaattcatgcaagaagaaatagaacatatgaatagcccttaatatatcaaaaaaacataacctataattaaaattcctctccaagaaagactccacagacaaatggcttcagcagttgattctttcaaatatttaaaggagaaataataccaattatacagaaactgggaaactcattaacagctggcataaattcagtacaaaacctgacaagggaattacagcaagggaaaattacagacttgttaatttcatgaaaataaaggcaacattctaaacaaatcattattaattgaatctaggctttatttcagaaataaaaagattgttttaaacattcaaaaatcaattacctgtactagtagaatacagagggtgaactatgtaattatctcaatagatgctaaaaaaaagcactcaaaaaattcaacattcatttataatgaaaatttcagtaagctaggaacagaggtgaattccttaatctgctatagggtatcttcttaagaattatatgaaaatcatatttggtgatgaagtatcaaaatcggaaccaagataagtatatccgctaatggcattattattcacattgcactgaaagttcgggcagtgcaatcaggcgagagtatgaatcagtacaaccactttgaaaactttttggcgttgtctactaaaactgaatgtaggcatatcagtctgggttcctaaccagcataaatgtttgtacaacaataggtacaaataagaatgtttgaattagtactatttgcaatagtcaaatactgggaaccgtcttaatgaccatcattcaatacaatgcagtctactcatataatggaatactctagagcagcagtcagcaaactgtttctgtaaatgaccagatagtaaatatttcaggttttctgaaccaaggggcaaaaccaagagtattatataggtactaatataccacgtaataatgtaaaaaacattgttagctcatgagctatacagaaacagtggtgggccaggtgtggcccctgggccatagtttgccaaactccactatagagaaatgaaaagaacaacctctgttacatggaaaagcctggatcagtttcacaggctgactcaactgaaagacaccagatgcaaaagagcatacgtacggctccctttatgcgaagttaaaaacagcagcacaatttatgggactagaagtacacagagggctcaaccctcaatcaagggttatcaattagcagggggcacaagacaggcttctggggctaggaatatcctctgagccgagtggcgttgtattcatttgtacaaatttattaaaccataaatataaatttgtgcatttgctgtgtttatatttatcttcagttaaaaggcttataaaataaattgttggtgaatatttattagtgtgtaccttcagagcagacttcgtatgtacaggggtaaagagagaaaggaaaaaggaacctctccaccgtttctgactgagcctcagggggacatgtgaaaggttctcaccaggcagttattacaggcagttacttcaacatcaaccaaaatggcaaaaactggaagcaagttgaatgtcccaaacttgagtattttttaataaattgtgatatatacatataatgaaatatcatgcttctttgtaaacaatgttattaaagaagttttatccatatgggaaaattcccacaatactgtgggaatacaaatttaaaaatcagtatatgaaatacacacacagtcacacacacatattagaaaactatcaaaatttcaactatggttatttctgagttacagacttatagataatctgtgtcttttttgttttaaactatattgtattttttcatatttcaaaaataatattgcgtatgtaatcaagaaaaatattttcttttttattcttttttttttgagacagggtcttgctacgttgcccaggctggtcttgagctcctgggctcaagcaatccttctgcctcggcctcccaaagtgctgggattacaggtgtgagccaccacacctggcccagaagaagaaaagtattttcaaggagcccagagtagggggaggacagttttaaagttattattctgattcatgagctttaccttgggaaataaaatatcctcataacctgaaagaaaaacacaaccatttcaactactttttagagaaatgaatttttaaaataaactttgaacaacctcataaataggacaatgtttcttatcactgctgtatgatggaggcaacaaatgtgaaactgaagactgtcagtatcaatatttatggtgaataagatgattccgctgatgaagatgtttataatacacattctttcaatcaacattaacttatcacctattctttgcccagcacttactggcagcaggtatacaggtaatcagatagtcaggtcccagaggattgtgaaatactacaagcatcatcagaaaaccacataaataaaaataaaactcctactctgatacatgctacaaatgagaaaaaaaaataattctctgggaacaaacaacaggcttccagccatttccctaaatccacaaagctggctttgaagtgtcaggcacacctgctgccttcctagtaaatctgacacatatgttttacacctggacaattcccatttttctagcggcgttgggttgggaatgaatttaatcacatacatttgaaaactatcggaatccagaccaatgctcaccacctgccaggggctcaggaaggatggataagtttcccttatgagaagaaaacaagggtccatgtccaggattcaagagtaattttctcctgcagggtggggtgcctagggctggagcgctggatagagaagggggctggattgaaacccagtgtcagagaactgcctagaccaacaggtattgacaaccgtcctgggtgaagcaagttcacagatatatacctttgatttaattaatttgttaattaaaatagaccaagcatagtgctggaatgcagtttgcacacttacggatctcacaggggaggggaaacatcttacggagctccggcgggatgccaggggctgacgcaggagtgtgtgtcagtgaccctcagagccagctcagataggaagggctgcaggagtgagccttggggggaacatcgagggtggcccagagatagcagccaccgccaaccgctggacacatgtcgggaagccaggctggactgcaagcctcgggccgagagaaggacagtgaggcacgtccggtgcttctgtgtggctctgcatcccacagaaagaactcagtagaaaggggagtttcagaaaccacgggaggtggtgaagcagtgagcacagcatgccccgcctggatcatgggcagtgcatgggagagaagctgtggtcaagtctttgaaagcaaccctagggatcccaccatgtaggagggggcaatcacccctgaatcctggacttggtccctcatttccctctacgtcccactcacaccgtgttataggtcgccgtgagagccatttcttcctgggtctctttccaggtgtgagagaacttccaccacgcccctcctgcagcagccccgtggctctatttgatcacgtcgtcttctgtgatgtggcagaagtgccagtcgcaagacgccctccatccagacacgcaggtgacatcatgcccccagacagcagggtgggagggaacatcttaaggggcgcttcgcctccgtgacccccatgcctgcaagcctgaacccctgtatgcgttggaagggagttcacagcatgccacattcccaggaacagcccctttggtaacaaaacacaggacgacagaataggagtaaattattcagtgtcttcctctcacctctgaacgcgcttcagtgcagtgggagcacattgcatttgtcctgccccactcgccccaggctgccgctgcgggctgactgacagctgcctgacagagccctcatctggaggaacaggctgtgctgagctctgtgcggacaagcgcactttgattcagatttagctaacattttctgagcttcttccaagtgtcaagtgtcaggaggggctgagcccttccctgacgggctgctgaaatcctcctgcctatgggacgggaattgcggctaggacaaatggaagcctgcatgtttgcaaaggcaccaccggaattttttttttttttaaggaatcagataggtatggccctgaatgcatgggttcaggaaagccataaatatatcctaagtatgggaacgttcagtcttcccaatggaccaaatgctgcgttaaccatgaccaggcagttcagccctggttcctgggccatgggggtacccacattcttcagaaaagcttccccttagggacgctggcaaagcttatggggtggggctcaccacacaggagtgcatccaatccatctgccaataagcacaactcaaaggggtggggagggatgtgaaaggcacaatccgaaaaccaggaggcggggcaggcagagggaggtgagcgaaggcgtatcaggatgtgcgattgcatcaggagccctttcatgagggagcaagcctgtgcgtcatgtgtcaggccctgtgaaataacagtaaggaggaaatggagaagaaatggatagcgtgtgtgtctgtgtttctgtgtgtaggcatccagatgtgggctgggctcctcttaccccttcaacctagttattggcctaggtgaggtcaatccccagccccacgacgggagagctgatggggtagggctactgtttagctccatcctccaggaacaagttcaaagtcctaaagggcctttcctccccgaaagactgcagtgtgaaacatgtgaagcacagcatatactatcagtgcgtacatgcacgcacacacacaaacacacacacacaaacacacacgcacacacacacgcacacacatgcacacacacaaacatgcgcacacatgggcacacccacccccacacacaaatacacacatgcaggtgtgcacatacatacatgcacacacacaaacatacacacaggcacacacatacacacagcgcacacacatatgcacacacatgcaaatcatttctgagggcaccagacctctcagaactgttgaggatgtgtgggttacatacagaaagaaacaaaaatgagaagcatttctttgaagagaaaacttgttccaccatcccgcccctttatttgctccttactctctggcctctccttagctcccaaatccccctttcactgctaacagagcgctggctacgggtggctgctgtttgaagtgtggctcaaagtcaaagtgttttttactcagatccataaagatggccccagaacccttggtaagggactgtcaacagaccctgccctccctgccctccctccccactctccacgctgatgccacccaccaggccaagtccatagaacatctgcaatgatgctctaggtcagaggggtgcagctgccccaagacagcttcagagccaactgcaggctgcaagcttgggtgggatgagtcagaagacaacggccttgtccagtggcctggaggttccacagacactgacagcagggccacagcccaagcggaggggtgcggcaggagggagattcaggaagctcttgggccagatttggtggtggcttcagctccctcctggggaaggaagcctcctgagggccgtggctccagatgacggcttggccggctcacagctgcctcagcacacagctgggggctgagagggggacattgaaaagcctcaggcctggcccacctaataatctgcagtcagcactcacatgccccagtggggttccccatgaacgggagcccctccaccctgcaaccacccagggattctccaggcaggtgagctcatcacagacccaaaacgcaaagacattgaaaatgaagacaatatctttctcgagaccagacgcacccaagacaggtgttttctaatcagtgcagtgctcacttgtgctggagacccggacacatatttccccatcactgtcactgacaaagatgcctcctgggatcagcaggtgcaccagtttgaagagcagctgtgaaagctgtcctggtgaagagtttgaagttgtggcccagatcctcacttaggagattctctgatgtaaaaaatgctgaaatccttgggaggtggaacagatttgggacccttggatgacaaccgaaagttcccaagaccaactttcacttcatgcatgcacaggcagggagaggagacatggagcctactcctgggaggggcaccaatggtggtttcctgtttgagggtgcacgtcacctgcctgaaatgccaacggccagtttcaggaaagtggaggagactcgtgatgtgcacgggaggtgggctcctcttacttagccatttatttaaaaaaaatcatttttccctgtaatttctctgcataaaaacatcaggcacttgtgggtaacctggagccctctctgccaatccttgctttatgggctgcagtcaggagctcatttgctccagagaggtcactatagaaaccttaggagaaagtaactcagaaggattttcacagcatggagagccactctatttctccccctcaaccaggctcttgtgttttcagcatagccttgggtgaaagcccagattggtttcctcagcaggaaaaggatctagagacaaaggtggcacgagaagtctgatgcagagatggccagggcctcaggtggttccacctgcccgaaaggtgtgcctaggagcttgtaaaagaccctgagcttctctctcagctttgcctgccctcctcagggcacctggtgggaaccacacatagttccaagcaaatacgcctgagcttcttatcaagttaagagaaaacaaggctcttgaaggacagctgtgcttatctggagtagccattgaggagagaggtaacctggctggagcgtggctgacctgcagcctcacgtcgtaaagtactcgttggaaaggacactgggcctctagacatccagtaaagctgacatccatgagaacaaaccctgtgctggcacttggcattcagaacgtttctattctcacacttacaggcaagaatgctcgcctgcatgccaggcctgtatctgcattttctagagaagctcacagagactcagagagattcaggctcttggccaaggagtttgagcctggtgtgctagacaccccagcctgggatcaccacgatgccctactgcctctgaaagtgagcagggcacactcagcggggtgcatttaagataaatattatcaacttcagacttatgcaaagtgactgtgagtgacagattgtccagggcagctctgaagtgacatgtgcctgcagttatgccaccaggtgttctcatgtttggtctgaaaaacaggatgaacataaaaattgttttttagactagacatcctttagtccgagaagccaaggactgcgagcactagctcaatgtcatttgaggtcccagatactcatttgcaaaaatgttagcccgtgtgccctctcctgccttaggacagttttcctctttggaggcttgaagatgtgctgttctcagaaccgttcctataaaattacaaatagcccagagagggactccggtgtgtgccgctgttggttaagaaggccagttagatgccgttgagagactgacaaagccaggtgctgaagtgtcatgggtgtgcccttagtgggtatctcaaatgtccttgaggtggtctcactcttctcttgtggcccccatggcactgccttccatgggccctgtgtaaatgccccccagtggaccctattttgaggccctctgttggttctgcatcaaggattttagtttcttgttgttcctgcaacaaatgaccataaattcagtggcttgcatgacacaaattcagtatcttagtgttctggagttgagaagcctgaaacggatctccctgggctaacacggagttgttgcaggcctgggttcctcctggagagcctatcccctgccttcccagctcccgcaggctgtgggcattcctctgcccagtgcccgtgcctttgtcttcaaaaccagaagagcttggctgggtccttctcacatggcgtcaccctaaccacctcttccgcctccctctactgtttacaaggatcctggttattatgtggggcccaactggataatccagggtcatcccccatctcgaagtccttcacttaatcccatctgcaaagccccttttgccatgaaaggaagcatgttcacagcttgaggaattaggacatggacatctttagggtctactcggcctaccacagggtattccacagttgtgtgtgtggatgtgatattgaggcaattgaagatggcattctttaccttctgcttagttattattagcatgtatatcatcttggacttaattgacctcctggtgcagggtgttaaggaaaattattgtgttctgaatcatgacctttgggccaagacgttgggagaccctggcccaaacaaggactttcagcttcctattagctttctgctgaaatgcatccacagccagggcctgtgagaccttggatggcatagactgaacaagctgtgaggtctgcatttgtagactcgaatctcccatttacattcttggactaaaacctcgctcctgcttatcatgtaatcatggagctaagctaggcttggagaagagtggcaagaagttcccacgtgcatggagctgtagtttttcccacattcctcttaggagctgtgcctaagatgctgcgctagcaacctctgtattgtgaaggaactgcgtttcctggattccaaaacacaggagttggattcctgtccttgtgaagccatctcagggaacagggtgggcggaaggggcactggaggccatcatgattgtcctaacaggcattcttctggcaggaactggcaaggatagaacacagacttggtccctgcagctgaaagggaggaggcaggatggtgatggaagaggcgaaagaaagatatttgcatgggcaagcccagtattcaataactgtggcaagacttcatccttacaaatctacttagggccgactccacacctgagccgcttcccagacctgctgttctatcccggaagcagagggcagcatggcgaagacctgcctctgtctttgacgctggcacattgatgcgattcttccaagctctttgctcctgggtgacccccattgcacgcagagcctccacaatgtttggggagggggctgagcacacctctgtgtgcttcatccagccagccagccatttattcattaaacagatatctattcaataacttcgagagccagaaattgtgctagttgctgtggaaataaattcacatgacaggctctctgctctctaggtacctgcagtaaatttcactcctaatgtcgctaaatgtctgtctctttttatatatattttatgacacttactgtgacttccagagcttcttttgtgctcatttcccataatattttgggtatttcattgtttttataccaaagcaaatttgtccaatttctagttcaaattattgcgtagatcgttgtggactaaggcagacaataataaaaatagtttcccactcttgttctttaacaaatttttcttttctttataagaatacattgctatagtttcataagcattaaataaaaaccatcttttttgttgttagacaattcgtattcgaattgttaaaatggaatttttcaatatcccagagccctcgaagattccataaaaatttagttccaagactatgaaaaggagtgaggaatctctaactcttcaagatactcattcaaaaaattttagcaaaccatcgatttctacaagtcccacaaatgaaatattgctaaacatattgctgattcaacacaaattccaatcaaccagtattatttgcataatttcattaaaatattcacttaaaacactgctttgacaataggaattctgatgtgcaattcatgtccagctgctctagttccaacctgcagcagcagtcagacatgaggtgcaaggggcttcaagggtggaaacccagacgcgaacgagcacagtggcctcggctccacttgctgagacatctctgcaagggatgttggaatgacgtcactccagcaagcctcccgggaagctcagagatctgttcatacctgccctggctaatctttagaagcaggatctgtgcacaaggtgtggccgcttctcatattcacaatcacttttcttttctttctttctttctttctttctttctttctttctttctttctttctttctttctttcttttttttgagatagagtctcgctctgtcacccaggctggagtgcagtggcgtgatttcagcttactgcaagctctgcctcccggtttcacgtcattctcctgcctcagcctcctgagtagctgggactacaggcacctgccaccacacctgcctaatttttttgtattttttagtagagatggggttgcaccatgttagccaggatggtctccatctcctgacctcgtgatccgcctgcctcagcctcccaaagtgctgggattacaggcgtgagccaccgcgcctggcccacaatcacttctaaaattgagagagctctctccgatcatcacacaaacattgttcactgtttttgaaaatgagtctccaaatctcagacacatctgtaaaaagctagtttaactatttaaacaatgaaattaagtagaatggtggggccaagagcctggcctggaccttctcgctgatcctcttcctgcaagggacaaaacgacaccttcatagaccagtgctttggatttgccggtcaaaaaatcaccctctcctgtcctgcatccgcactgattgtagactctccctccaggctcagctcacagcccacccatctccctttcagccagggccctgcagtcagctacacactccatccatgccaggatgccctcacggctctattctctcacagtagccacccatcctcaggcctagggagccccctccaccatcatcctccaatcctggtcccacgtggtctgacgttgctgaagatagtgatgtagcagagccagctgccttcatggcatgttcatgctgcctgacccgagttcagaggccttgtcactgtcgtccacagctcttgcaaatatctccatttccactctgcagaagccacctctagcccaggcattctctgggtaggcccatgctgtcacctgcaaaagaaccacctgaaaatctcattggaaaactggttcctgggcctcaagctaaaaacaactctgttttggcatatctgaagtggagcccgagaatgtttatttctaacaagctcccgggaggagggtggtactgctgctagcctagactttgttgagaatagtatggatgcagaagggtctcgtgcctcctggactctaaagaccataagagccacctgaggactctatgaacatgcagactctgcttctgtgagcctggggtgagcacaagcatctacatctgaaccagcatccccgctgctgccactgctgcttgtcaggtcacactttgaagctcaagacgggagatgacttcaacctcctgacaaacccctttcctgtcctctcccccacctccacatttcaatctatttataccaactcctttcagcctcctctccaacctgattctattacgatattattggcttagcacagcataaggacggcgattacaggatatgcatcttcccttctcacatctgaggcagacgtcgctaatccatcctggtactattttgtgctgagcccagacatagagacataatccctcttgctgtagtgtgccaagcagctccctccagtctccccagcctgtcacatgccttccctcgggatggtgcttgggactgttgtgagctctccatggctttatcctgcctcgtgggccatgcatgccggtgaagccagacggtgtgctgccttaacccacaatccaccaactgtgacaggctgaccccaaccaccattctaatcccttgcaatccactgttttccctctgcgtttgggtagcacttggcatatacggtagccacctgcatcacattcctggttgcactccagtgtgtaagtgtgtacatgtttggattgttaagtcatctctctaggtggaaatacaactggatgtcagcaacaaagccctcatcacctttctgccccctgcactgaacagctcagagcctgcgacatggcctatctcattaggagctgtgacatcagccaggtctcagaatgaggaaacacatagatgacagccacacccacaccacagcccccagcgtgtcacttgacagacaggtagcatggccattgtctggggactatttgttactgcaccaaatgaactaacgcagctcttattcttgctaggactcagaaaggctccagggaagagcccaaacttccctctgcttgagagagccgcagggagtctagggaggccagaagggcaggcattgtctggtgggttacatgaggaggatgtgcagtaaacgggtggtcccgctgacagccgccttggcaaaaaggacagagtccagaagaaacggagactcatcatgggatgggctccacttggcatgggaggctgcatggggcaaacacagaacaagcccaggaaaccacatggaatccactgcagtcaccaatagtccccaggggaaaggaattaaccatagaggcgaagaagagagaaaaacctaaggaggaaggcaataaccttgaacgtgactacattttaaacttgaattaacaaagacatcacaggattggatagaacccacttacaaatgacttcactaattttctgttattaaggaaaatgtgggcttttgatagacacaagtcaagttatgggaaatggaataaagctacacttttttttttttgcacactcacgttttataaagtttttttgactgtgagtaaaattcgtctctatgccacacatagagaccggcatattttcacaagctcttggtcttaggtatttgaaaattcaagggctaaagagaagtgcagaattccccctgggaaattgacacaacatgttagagataaaaatcaaagtgattcttcttttagaccgagtctccccgggaaataggtgtgagcgcttcacctcggagggaacttgctgccaagtagttggagatgctgaatctcctttttctaggagttacactgatgctgacaaatgctcttttcaaatgattgattccccaacatgtgagaatctgagttaaatctgaacctcacagcacaagctcagagcctgagatgaaaagctaacactccatgccctgcctggccttctgcctgtgttagagagggttctacctttcagaactgactttgtggacacagggaaacagagtatgatcttttttggcagttcacacagcagcgatgggtcctgcagccattaaggtaaatgatgcttccacgctattttagcctcaaagtgcaagttcccaacacggcaagccatccattggagagcaatctacctggagataggggttggcggatagccctaaggaaagacaacatcttacctgaagtgaaggaggcactgagggatgtccccaaagaaccgcttgattggcttggattcaaatggtatcaataaacatttatgatcttaaaattgtaatttcttatttcagtggcagtgaatgctttcagagcttgggtgttcaagggagtcattttaaattggattagtgagggcaactgcagatttcccaaggaacacatgtgggtgcagggccaggttgccaccatcgctccagttctgcaaccagaactggggtgatctgaccaagtcttctttctttctttcatctggattcccggtttaaaaagcaaatgcgcaaagcataataaaaggagaagaaatattaaactgacgaatgggaaaggagacaaggtgacaggtatttggaactggagaagtgttttcaggctcgactcacaaacaccaacaccatgtctttctaatgttgatgacaatctaaagagacagggctggaagtttcctttaagatcttggaggcaattgttaccaaatcagaacactcccactgggcttacggtgttctccagactgacaaagaatcagccaagatgtttcgtggtttatcaccaaatgattgtcacatagtgtcttttccaatcaactggaacatatctcaagaaatgaacaggttatgagagaaagcaccaccctacagaggaataatataaaatactgcctcaaccctgccacacaactgacccagtctggggtgtctttaaccacagggaataatttgggttgattctttccatccgtagacagtatttcctacatgtatctttgtaacttcaaagttttgtagggttccagcaaattcatcctgtgacaataatctagtgtagattaatccacaggttaacccacaaatcctggattcagcagcctccggctccaccagctcagatgaccatgtagaggacaagccttccttcgtgcacacaggttagaagcaaggctgcaccctcatttgctggggactaaactggagagaagacagtgataggggtcttgaggacccccacatccatttctccatgggagaacacattcccatgccatggtatggcttcccagagctgtatgggtttgagggagtgggattctaacatagagaaatgaggttccagggaacccaactcatcataaaagacagaggggtgtttgtgatgctataaaaaccagtcaccataaaaaagaataagatcttgtcctttgcaggaacatggatggagctgggggccattatcctgagtaaagcaattcaggaacagaaaaccaaatacctcatgttctcacttgtaagtgggagctaaatgatgacaactcatggacacaaaggggaaaaacagacactggggcctacttgagggcggagggtgggagaagggagacaatcaggaaaaataattattgggtactaggtttagtacatggatgacaatataatctgtacaacaaacctcttgtgacatgagtttacctatataacaaacctgcacatgtactcctgaacctaaaatgaaagctttactttttttattttaaaaatgaaatacagttcatttaactttaaaataaaaatcaaaatcaggcaccatcgccgctttggggaaagtggtttcactaacaaaggctaatgttgaggacccacaaagttcaaacccactgtctcggggctgggaggaccacatctgacccacttcagatgggtgcccagtaagaatgtagtaagtggatgactgtgtacctgcacgtcctggcatgatatcctcagctaggacgataccctcaggccctctcaaggcagttttcaccattattaaacagtttgagcattagaaaatccttttctatatcaaacaaaaatataaacacagaagggcaaagggcgaaccaatttcatttctattgaatagaaactacaaatgaagtacaaaggatcacgctgagccacaagccatatttccactagactgctagatttctctacttaggtgtcccaaagaaaatggattataggaaagtctcaagaaaactgccctagtcctaagggtgttaaccacagagagatttttttccccgcctcctaatagtaatacatatgcaaaatgcttctacacattttgcttccaaacgaggtatgccaaaagtcacttctccctttgtaagtgaagccatatttgcatagaggaaaaagcagaatgtatttcagtctttgttagggaatcttgctagtttgacgtacaggttgtattttttttaatattttaattttaattttaagttccagtgtacatgtgcaggatgcacaggtttgttacatagataaacgtgtgcaatagtggtttgctgcacttctcaacccatcacctaggtattaagcccagcatgcattagctatttttcctaaaactcttcctccctgcccaccctcggacaggccccaatgtgtgttgttccccaacctgtgtccatgtgctctcattgttcagctcctatttattagtgagaacatgcaatgtttggttttctgttcctgcgtcagtttgctgaggataatggcttccagctccattgtgttcctgcaaaggacaggatctcattcttttttatggctgcatagtattctgcggtatatatgtatcacattttctttatccaatctgtcattgatgtcattgatgggcatttgagttgattgcatgtctttgctattgattgtgaatagtgctgtaatgaacataagtgtgtatgtatctttgtaatagaatgatttacattcctttgggtatatagccagtaataggatagctgggtcaaatggtatttctggttctaggtctttgagcgtgtttttttttttaaggcaaatctctttggtaggatttgcctaggggaagacattggcaggataaggtggactgtggtagtcctcatctgcatgcacatatttacaccaagcaaatcttttagtacccatgccaaagacccattccagagcaattcactagcatctctgcaggcagagtctgggcatcgacgagcataagtttctcaggtgatgaatgcatggtcagagctgagaaccactgttttcatagaagactgtgctggggaagtcgtgacgaaactgtattttcagtgtcccccttgctttgggggaaattacaggattgctgcagcgctggaattgtacttagctgaggattgagggccttggcctctgctgggaactccgcagtgtggatgagcatcacgtacttagggccgagaacactcacacaattgaagttcccaccttcaggctgaggccctgcgggtagaatttaaatattatcagatgttcatctagaagggattcaaaaagagtgtgaagtgtttatggattttgaattcttgatgttctgaaattataattttgttgtgtttaaaataactagagggtggcccacagaacagagtgggggatattgctgacttggatagatttccaaactcaactagataaaaatgtccacagatgggctcactggggtcctgtttaatctgttccccatccagaatcctctgtctcagcctttggcattaggaaaatccacccctcccagagaagtgaaaacctgcttcccacaccccctcagccaccaccacttcccactgaatccagcatctgccccttgttcagatcatcctagctcccgcatcccctgccagcgggaatacccgccagactctcgggacctccttgcctcctgtccaccccaagacccattcctcacactggctaaaaactaatcagccctgtcactgctggctgaaaatacttctaaacttgctcagtaagaaaatcccctggggtgctcattaacagttcagatgctttggtctcaacagacctactaatctgaatctccagggagggtccctagaattttgatttttttcaaccctgcccccagctatttctcatgaccaggcttgaggcagtgacccgaggaagcatggaaggacctccagctccatttctctcctctccgagtcctcagcacataaccagcgttcaggcggatactcgttcaatgcaggaattaatgagtcacaatttatggttcagcaacactgacctatttatactcaccacgcctatcaagtttttttattttatctccacacttgttatttttcatctgcctctgtacttaccaggtctctatataaatgtctattgatgtgatgtctcccattaaaatgtgagtttcttctggataagagttatctttatccacccgtccttaacagggagcacagtggccagcagacaatagattctcaataaatatgcatgcctttaatgtgtgacgatccctggtggcaatgcaacccacacacccagggtctccagaggaaactctggcccacacaggttaagtgacttgtataggacacacagcaaaagcaaaacaaaacaaaacaactagctttcaaaacagttgtggtattttgtgctttcgagaatattcccagaattcttagaagaaaaaatgagaagacaaatgtaaatatcccatgacagggtagcagggcgccaggcaactgctctgatgccaggagcaggaataagtgctgtgaaagcacagggaggcttgtggtgactgagagtgagatactgtgctgtgagccctgaacctgcacctgctaatgtggtcatgtcacttctgctggaggctgatcctcagagccacaaagccaacatccaccgacaaatagctcagcaccagctttccctgcctagcacctgagcaagcactgggggaacccacaaggaaggaaaagggagccacagattttcagatgtctcgaaagtaataacaaaagaggcttataataagaagacttaattttattcttaaagtttgacaagaaaaactgattagaacatagtatacacacagacatacatgtgtacatacatacacacatgtgtgaatgtatatacatgtagatacatatgtatatgtgtatgttaaggagatatgacatatatgttatatgatatatatgtgcacacatttattgagcacttaccatgtatctgataccgtgttaagcaaattaggcccataatttagtttaatcattataaccacccgcaccaagaaggcactgcatgctattttagtggagaaattgaggggtggagagattagatgacttggctaaggtcacacaactagtaggcagtgagcctgagatgtaaactagaatctttcagagtccagagtccagagtccaaactcttaaccgcactgtcatcagcatgatggtaatgatggtgatgatgatgacgatggtgacaattatggtaatggtgatggtgatgataatgattctgatgatgataatgatgtaatgttgatgatatagtgatgatgatggtgacaatggtggtgataatgatgatagcgatggtgatgatgacagtaatgatgatggtaatatggtgatgatgatgttgatggagattatggtgataatgatggtggtagtgatgatggtaatggtaatgatcttggtgatgagggtgatgatagtgatgctgatgatgatagtgaggtttatgatggtgtgtgatgatgatggtgatgatggtaatggtgaaaataataattgtggtgatgatgaggttgtaatgttgataacatggtgataatgatgatgatagtaatgatgataatgataatggtgatgatatcaatgatgacgatgataatggttattttcttgatgataacgataagatgttgatagtaattacagtaatgaagatgatggtgttggtattgataatgatgtgcagttaacatttattgagcacatgctatgtattgagcactgttctaagcacttttaatgaacaacttgtttggtccccacagtgacttatctttgttctcatgttagagttgaggaaactgaggcacagcgcatttttagtttgccaggtttaccaatgactgggagaatggggattaaatctaggctgcctggcactaatgcctcactcaaatgtctaatgcatctcataataagactatagactgactagtgataagaaaaaataattaaaacatcctgatgaaattgtaaggggtgaaacaatggctcataccgaaaagacacttttccaaatgattaaggaagggtctggacttggagagcactcacctggtgataagaatctttcagaaggaagttggggtcttagaccactgtctagcaaagcacactgttgattaaacacaggaggaccagaaagcgctggtagacagagggaagaaagttcagctccaaggctccttcaaaggtggcttttgtgataaactcaggctgggtccttttccctgcataacctttccacccaggccaggggagtcagctttaggtttaagcagtgacaccagctttgtgatgttagaggcagcagctaccctggagttgtcaggctggtgatggccaggccctcccctctggtcaagtgggactatgtgttctctccaccttcccttgaccctaaatgttctatccaggggacagagcaaatgctctggcccaggggatgagcagcatggtccaagcagggataaagggtgaagccacaacaaggatcagggaataaagtggacacgtacagggagatggcagcctttctacctgaggacagtgctgaccaagccaacagaataaccctgggtccacttacctgggcaattctccactggtgacaacttggtgcctaaatggctcaaactagaggaatcgtgtgtggggggtggtggggaggtgggtgtgcaatggcccacgtgtgtgtacatatggtgtaatggtgtatacctgtgacataccctggaacagccataagcagcttcccaaatgggactctatgcagggaacattcacatggcttcctgctttgcaaaaatttcacaaaattccttttacatccttgattaacctgggttttggagggatggaatgtagaattttctggttaaaggaggatttccgttaaaaaatgttctatatattattgaaggttttccagacttgaatggtgttttaaacaatataaagtcaatataaggttaataaacatatttcagaaggagaaaaaaggaagaaggcaagaatgaaggagatgagaaaaaagaataaaagaggaagaaaaacagtgaaaagagaaactcacagctagccttgtacagccataagttttactagcatttgggcatttcccttctgatctattttctgtttacagatttttttaagtttgtttttacaacaattgtaatcagagtggatagacagctttgcaactggttacttctattaacacattgcaaacattttctaagttgttatgctccataaatattattttaacacattgtattttttattattgtgcctataattatatattattatatattaactctggagaaagtagaaacaaatgttatgcaaaaggaaaaattaaattgaattataatttcaagacttaaaaataagcactattattcaggcaggtattcattcaatatacatagaagaagagctaatatacagatacagacacatccacggatacagacaagagtaacttcacccaccgcatatattttgtatatagacaaaatgggatcataagtcacacactgtctttaactgattaaagtgccattaagtgttgagttttgtttaatggccaaatttacttccatatctctcagggaaagacaaaaaaaaaaacgataaaagattgattagggagtagctcctttgctctgcctatttaaattattgcaggctccacggtttttatttcaaatatccattctcttctaccagctgctccaggtaaaggggaaagtccttgcttcctgtttagagcctcgcctctatgccatatcagccctttattgacccacccaccacccacttccaccttgtgagacaggtgtgcaaaactaggtcctccagaggtgggcaccctgccccaagtcacactaccaggcagtggctgagctagaattgatcacaaaacagaaagggccattggacttccaagccctgctttcaccacgaatctactctgcgtctccatttatttgcatttcactgggtttgctgctgaaggaaggatgtgtggagtgtttattctgtactgcacactcagaaaatgaaagataaaactaccaggacttcaggtgctgcctgtaagtgatttttatctttggatgaatataggtgatcctcgacttactatggtttgatttacaaattttccatttgcaatggattgatgcagacataaccccgttacgatggggtcaaggagtatctataaataccaaccttgaaatgtacaatgtaaataactgacagaagtattaatatccagaatacagagaaaactccagcaaacaggcaagaaaaaggaaaggcggttaataaggaaatggataaaagttaggaatagacactctaaagaaggaaaaatcctggttaatagggattgaagagttgcacagagtcacatcaagaaaatgaacattgaaataccatgagatatgactgtctacccaataggaagaggtctgaaagttataggatgataagggttgtggaggagccctgtcagctgctggtggaagtgaaaactgccgtggagaaaagctggggagtatctggtgactcggagaacctcagtcccacatttgctctttcacaaaaaaagaagctttcacagacaaaaacaccagttaatagatgaaaggatgttggtcacagtattagtttgataatagagttagagataacctaagtgagcattaggaaaggagggcataggccgagtgcggtggctcacgcctgtaatcccagcactttgggaggctaaggtgggtggatcacgaggtcaggagatcgagaccatcctggctaacatggtgaaactccctctctactaaagatacaaaaaattagccgagcgtggtggtgggcgcctgtagtcccagctactcgggaggctgaggcaggagaatggcctgaacctgggaggcagagcttgcagtgagccgagatcgcgccactgcactgcagcctgggcgacagaccgagactccatctcaaaaaaaaaaaaaaaaaaaaaaagggagaggataaagtgtgtgaaatagtcaaagaattattcaaagaccgtctatctgttaaagagtaggaagtataaatcaacacaatgtacctgaaagataccttgagtgaaaacaggagaagcagaatgaagtacatgacaaaatatgcttttctggtatataagacagggaacctctttggaagaaggctgaaactgagggtgggagataaataaaatttaaataaataaaaactatgtgcatgacggcagcattgtgctgcaaattgaggattataaccaatccagttttgcacacataaggatgaatgggtcggggtaaacatttgatatgaatttgttgcatcttttcttgaatttagctactaaagcccaagtgctttgcaggtgggggtagtccccatccgttgcacacttctgggtgatgaattctgctcagttgacagttttctgcctttctcaaagatcacatttggagtttgggcttaatctatcatgcttccaaaagaacagcaaaaaaaaagaataataaatggcagactaaatggcaagtagctccctcaactcatgtctgggtgctcgctgcgaagactctgaggcatccgtttgaaaagagtgccaggaactgatgactatgatttgatcctgcctttgcagggccttgttgttggagggattcatcatgcgtaggaattatttgtgccttagctagaagccaaatgctctgcattccgcattcgggaagaagcacatggccgccatttctactcacttaccccggagataaatgacagctttacatggacagatgcagtctgtttgctggcttccatctggtttttaaatcactcaaagaaagctccaaagacacatttttatgctgcataaaatacacagaggagaagaaaagcctgggcttcacacatttgttatttcattatttgtgttgcctttataaaaggaaaatcatggagtcatttccccaattcttttgacctctgaacattcattgcaacctcttaaatttgatgtcttcttcctaaatgtcctctctgaaattgcccgataattcactctttatgcagctctgacagggaatgagaacatttctactttaaacagctcggggcacctgaggagggaactcaggaaaacgcatactgcttcgttttggagaagaacatgcagagttcctggccagcactgtgcagccacgactcccctcccctcggaccaagaacagagacttgactattgtgtccttcactcgtgccccacatgccaaatggctctatgacccccttcgttggttcagactctgccctataactcaggtgtccatccttctgctggcctcacaccctctgcctggccaaggcaacaaaggtctgctgagttcttgctccatgtggagccaaccctgggctctgaggatccacctctgagcgaaaaagccactcagggctctactctcatggagtttgctttctatagtcgggagggagacagagcagaaacaaattagtgacacgatggtcatccttaggaataaacgctgtgaagagaacaaaaaaggctccatgacctgcagtgacagctaggcagagaagaaggaaggatgaagtgaagacatttgtcctgggtggccaggtaggacctgcctttgcaagagatatttgaactgggacctgaaggatcataagaagccgccacacacagacatggggaaagtggattcaggcagagcaaacagaagtgcaaaggccctgagatgggaactagtgtggcatgttcaactaacaagaagtcccaaggggctgaggggtgccaggcacagggattaactctactcaggctccattcttttccggagaccccccacacaccccccaagcccaggatcatggccctacacaccactcccatggcatgcatgtctttgtcacaattgttacgtttttccaaagattttgatgtctttttagaattgtatctctaattcctaacacagaacttagtacatagtaggcactttgtacattcatgtcaaatgaatgaatgaacaaacgcactgcacagtatccatcagtgtgatcaccgccatgttggaagatgccaactacaagggcagccaatataactgggtctttcttcttgccacaggccctggacctctcaatattaaaatgatcccctacctcctctgaccccttccaacattggagtttggtgagaataataaaaatagctaatgcttatggagcagatactatctgccacacaatatgcccttaacatacattttctaaattaatactcactatctccaccctgcaaatgaggagcgaaagccagtcaaggtaagtattggcccaaggtcatgcagtattggcccaaggtcatgcagctagtaagggctggaccctgcacagatgtgaatccaaatattcctgattcttaagcccataggcttacctcccagatcctgctctcaaaagcatctggggcctgagtgcaaggaaaagatcaggggtcagggagtcagggtggggggaggccagcaagcacctggggtcaacagggtgacagagaagagaggactgagaacttgctcctcagcacctgtgttttgcaggcttgaactcagctgtgttccatagggttcctgtcctgcttgaggttaacactaagaaacactgagccccgggcccttcaggtgaactggggacagacacctccttcagggaaaagcctgatgcctttcatcttggtgccagacaactttgttactgagcataaagattgattactctccttgctttgaaggctctagtctgtgaggtcttaagcaaataattactgacttgaagtcaactttttgttatccttctttcctctcttctcctctctgcctctcatctccccctccttctctttctcccttacctcctgctgagcctggccttttgacaataggcagaattgatctcaaacccctccaagtttgacccaaaacagcttccagtgtgatgcttgctctctctccttctttcccactgagaaatccgaggccctagggcagaggtcagagggtttttgttgttgttgttgttgttgtttttgtgtgtgtgtgtgtgtgtttaatttgttttgctttctataaagggatgagcagtaaacactttaggctttgcaggccattcaacctctatagcaactactcaactctgctgttgtagcatgaagacagccacagacaacacataaatgagcatggctgtgttccaataaaactttatttataaaacgtgagctgagggccagatttggctggcaggtcacagtgttccaaaccctgacctataagaggtgtcatcctaagaaggaaggatcttggactcctgagtcatcacttgggaggccaccttccagacatctgcattgaaagaaatcacttttattggattaagaaacataccaagagtttgtgttgttgactatgaaatgcagtctaccctgactaggattgttactcttttatcttctttgtactgttttgtagtgttttctttttctttacacacatatttttattaacttcattttttgggatgtgattgtttgcctgaaaagtagtttccattttagatggctgccttattagaaaacccttgatcactagaattttttgaaacttagacatgcatctctgcattccatctgtatcagccaatgccattctgtaaattccctcctcgaaaactaaccacatgattttctgtggtatcatatgcagcaagattaccatagttagaaccaaagactaaaatacattgctccaaatttaattaaatttgaattcaatgagtttggtttctgctgaactgttcatttctgcaaaggatggggagtttctgatacaccaaactaatgagcacccaggaagccagcagggaggatcctctgatgatgtgggaccattcttgccaaccagaaatatgtctcctagcttaagaagtaactgatagtcctctagggaaccccagtatgcctcaggtaggaaatgtgcttccataagcaaaaatcaaccaaattttagaagatctatcattttcctcattttccaactcaatccccagaagagaactgtgcaatttaagcccactcaaatgttggggcacagagggacctaagaggaaaatgagaagctgggtaaagtaatgcactatggagactctggcaggaaattatttgtatgttcttcatgggctcggtctaaatgtggcccctgagcctaggacttcagggcttacttattttccagcccttcccaaccttctctgcagaaccagtatggggcctagagtcaaccttactcagcatttatgtggtcaaagacctgccgctctttgttttagattattttcaaccatctgcatatttctgtagcttcatggtctcttctgttttccactaccacctgtagtgggttgaatgatggtccccccaaaaaaatatgtccacatcgtaatccccagatcctgtaagtgttaccatatatggcaaaatgtgtaagtaggttaaggctattgagaggagaatattatcctgaattgtgtgggtgggccctaaagataatcacatgcatccttataagacagacacacagaagataagatgatgtgaggatgggggaagggattggagtgatgagaccccaagcccagaaatgcctggagaccccagaagatggaagaggcagaaatcatcctcccccacaatcctttagaggaattatagccctgcccacacctcaatttcagatgcctgcccacacctcaatttcagatgtctgccctccagaacttcgagatcatcaattttggttgtttgaagccacccagtttgtggtcatttgttacagcagctgcaggaaatgcataccattcaacctcccaaaaaatgattttaaaaatcatcattcgttcactcaataaacatatcgataccgctgattttaatgggccctaacgctgtataggcactaccctgagcacttccacacggtggcatttaaccctctccatacaatcactgctaccacccccttatagtcagggcagctgaagctcagaacgtggggataacttgctcaaggtcacatggcaagtggcagaatcctggattcaaatctaagctggcctttctccagtgccttccttttgtccacttccctggagttccacatctgttccagattctggcgggtccccagcatggaatcctgcagaggagactctgcaccaggcctggggtggctgcaaccagaagtgtcccgtgggcctgtcttttcatctccagagtgcaccttacttggctcaaagaactaatatggagctgaatgagacatgaatgctttatagaccctattaagacatggcagaggaggatggtagagaatgttctacacctattaaggtttcctctctcctgtttttattatgtcacctttcttacctagccaaagtcatatgagagaaaaatacccaccaattgtttcaacaataccatagctatcccacaattctgtaagggtaaaattcaaagaggctctagagctcactggtgcagtcctttcctgtggtctggaatccccttatgacatggtgaagaaggcggaagcctgggcagtggggggaagaaattgaggaggattcccagctccctgcgccagtacttggctgtatgatctacttaacccttgccagcttccatcaagtaataataatttcaaaataatacatcataatgccaaaataataatgtcatctgtacagaactatagtgtgcctttcattaaaatactccactaaattttgggcagcatggttaggtcaggaagcagctgtttcttttctctcctgggctttcaaataatctaattttatttacatttcttatttaattttaagggatctgattcattaaaattgtctgactagctctaattctcaaaatcatgtgtcggtaatggggaaatctcatgggaacaaagattcaatcatgccttgatcatcgactctcatccagttgccatggcaatctagagtatcatggcgccctccacagatgttccagcaaactttggagaagacgaaaaattaagcagatgcattttgttagagcaataccagtgggagcaatattgagctgaggggtcaagctatacctctgtggtgattctcaaattgtcatgagcaagcgatatttgcaagagaacagttaagcagaccctacagaaaaatcatagaaatgtactacgacgtggaacactttgcctggtgagtatataaaagagaaaggtcagagaaggcagtaattatgttacaacagagatgatgttgaagggggattcaatgctcagtgctgtgttagacaatgtcaggtatttttacgtcatgacgaagagtccatgtaatgctcgttgacttctttcaagatgtttagagatttcagtttttcaactgaagatgccaacaacttttagccctcaaaagttgtgcctgggaagaaaccttttgaaaacttccagcccagattgtgtgtcatctggtccgagggatgttttactctggccacttgctggcaagttacataaaaatacccacatatgatgcctgatatgtgagctagggtagttgcagaagtagtaaatgtgctacttcaaataatagtaaactgttgcattaaacttttatttgttcattcattcctggcttgggatagggactgggattggagtttataaataagatcaggaggcctgtgcttgggaagcccgtccaaacaacccaatttgaagggctttgacatctaggcttggataattcgttgcatgacatgaataaaattttcttaagatttttgtgttagaccaatccaggttttctagattaaatctcatggtcttgaaggggatagtctcatctactcagagtggctaagtaggattagtaataaaggccaaacaatttgcatactgtacaaaagaaggtgacggtattccaaaagagctggatgagcatcctaagcaagaagtgtagcactgagctctaagagcatgttgattctagttgccactgtggctgacactgaacacagtgatcaataattgtggtggtgataatgataatggtgatggtggtggtgataatgataatggtgatggtggtgatgacaagatgacactgataatgatgatggtgatgataatgatgatggtggtggtgagaataatggtggtgatggtgataattatgctactgatgacatgatgatggtgatgataatgatgatggtggtggtgagaataatggtggtgatggtgataattatgctactgatgacataatgatgtgatgataagatggtgatggtcatgatgatagaaatgatggtggtagggatgatgataatggtgatggtaatgatgatggtggtggatgatggtggtggtgatggtcgtagttatgctactgatgatgatataatgatgacggtggtggtgatgataatggtgatggtggtagttatgctactgatgatgatataatgatgtgatgattgtgacgtgatgatggagatggtagtggtcatggtagggatgtgatggaagggatgatggtaatggtaatggtgaagataatgttgctggtggtggtgatgataatggtggtgatggtggtagttatgttactgatgatgatttaatgatgtgatgacgatgatgtgatgatggagatggcgatggtagggaagatgataatggtgatggtgatggtgagtttgatgatgatgatggtggtggtgatagtgaaatatgatggtgtgatgatgatgatgatgatgatgatataaacctaaagtttattgaaggctacctatagagcaggtattggcaaactatggcccacaggttaaatttggcccactttctgtttatgtaaataaaatctgattatcacacagccacgcccatttatttgcatattgtttatcactaccaccacactacaacagcagaggagaatagttgcaatagactgtaggggccacaaagcctaaattttttactgtttgatcctatgcaggtaaagtaagaaaacttctgctgtagagaaaggaaggtattcaccagtctagttttccccaagcttcagtgcacgtaaaaactacttagtgggtatgctattgtgatgtatagtaagacatgtaaatactggttttcctccctggttcctggcactaagctatggaaacacttttactttcctgtgtgatatgtgtgctaggtgcttattttgtcctgacgtttggtatttgaacccggttcctgagacagagctcctagtctcttggaatttcctgggtgattagagcatgttttgttctaaggagacgactcctggtgagctcctggatggagcctggtagccagaagcaacaaggcataattagaagcctggaagttccagccccatttccaaccctccagcctttgggaagaaaggaggagctagagattgagtcaataattgatcatgcctgtgtgacaaggcctgcataaatacccctgaactacagagtttagagaacttccaggttggtgaacacattccagggcaaggagagtggtgcagccgaatgtgatggggacaaaagcttctgcactcaggacccttccagaccttgctgcacatacctgctcatctggctgttcagctatgtcttttatcatagcctttattatacaataaactgataagcataagcattttccttagttctatgagctcactagcaaattattgaacctgaggagggggacgtggggacgctgatgtacagctggtcagtcagaagcacaagtgaccacctgagacttgcaattggcgtctggagtgggggcggccctgtaggaccgagctcttatcctatgagacctacacactgtcctccagtcagtgtgaggattgaattgaattgcatgacacccagttgatgtcagagaattggttgttgatagggacaaaacccacacattttggtgaccagaagcgaagtgtgagaatatatagagacagacagtttgatatttcctcacagggggcttgtatgattagactcctcagcagttgtctgtggacagttctttgataaacaccttatggggtccagccatgtgagttttgagacagtattaagtgtctctgatcctctagtctatcaaatgaggcttacatttgatctagaggtattggaaaatcgaactgatgaaaagtttaaaaattcaacattacataaattcaagcagaattaagccagctcaatcctccttaacaaataaacaccttcaagcttcttgcacagaccaggatatagaattttaagtttgtcagtcgctaagtagacccactggagaaaattgcactttgcctttaaatgatttactgctgtgatttccaggggagcttaactgttcaccattgtctccaggcagtgcattctccaattctcagacacgttgtctcaagaaaccactattttcagtttgcgattttttttctgaaatttttctgagaaggtacagctaaattaaattattcttcttgccaccaaacatgagttatggtctccatctcatttagcaacttctgtaatttatcaccattaaaaatggtctaaaagggcttaatttagttaatagattcctcacctcagagtcagcttccctctggtttaagctgctgtttctcatgccacagaaagacagactctctctctgaaacagatattactgatttccacataatgttcctgaagtctgagctgacttttcatgaagtgagacagatgcatggcgctaactccagccacctgctgtggcctcggattggcattttaaatgagagagggaggacccaggcagaaatccctgccattctgtgggaaaagaatgttggccaaaaaggctataacaattccactctttctggcctcccttaccactaaatccataggcaaaggggagctatctttcttggattagtcaactgtaaaagcaggcataatgagacacaggtaaatcacaacaggttgatgtggaaacttacaccggagtggacagatgctgaaaaatggcagatgtgcttaggggaaacacaactcagcttgaaaaagagctttatggaaaacaactttagtatttgagttgaaggaagatataatgcctataagaaataggagtcccagaatgttcacttgctcagtttcctgatacaatgccatctgagtgtctcgttgaccccgtgctttctaataatatttgaagacattttcattcaaaagacctgctatttccatacataaaactcatgtatgttcattgtggtgtgtgtgtgtgtgtgtgtgtgtgttcagaaaatacagattttttttttttttttatgatggggtctcactgtcacccaggctggagctcagtggcacgatctcagctcactgcaacctctactttcccgggctcaagtgattctccatcctcaacctcccaagtagctgggactacaggcacaaaccaccaacacctggctaatttttgtattttttgtaaagactgggttttgtcatgttgcgtatgctggtcttgacctggactcaaagccatccacatatcttggcctcccaaagtgctggattacaggcatgagccactgcacccagccaaaaacacagaaatttatatgtaagaaagtaaaaatatcccaaattcccaaaacacacatataaccatgtgaatatttcacgttttgtgctctttttggccgtttcccatgtataaataagtatctagatagggatatagattgatcacagaattagaccttgtgcttcttagcaacccaagccatctgaacagtatttcgtggaaacattttccaattactacgtacagacatttgttatcattttttaatgacagcatgatatgctattgagtgaacaaatcacaatttaaataatggcctatttgggacatgtaagatgttcccagggttgatttgtttcactaatgagccaccagatatgcacccatggaaaccttggtccaaccttttcttattataaaaggtgtcagggtgagactaatgcaatacccttgcggttcccctcccagccccagtccatggtgctgacagctgcctccacacaatgggaaaaagagcccaaacagaactgtccacgacctttcttcttgcccttgcctttcacctacacccctctgattcagggcacattagggaggcttgtcagtgcttcttcagtttacctcctgtatcaccctttgtgctgccccccaaatccccttccacttaatctagactgtagaaaacaggagaaatgcctcacacttgataacacaaagtttctttctgccaccgtgtggggcaaacagggtctgccttcctgcaggcaaaggattaatccaccttccttgaagtcactcctttaacaggtaaactggaatccagggcatgcagccttgccccttggtttccaaacacctgctgaggtccgagtcacaaactccacgaaggagggaaaggtatgtccacagtagggcatccagactttcctctccttatcaccaggccggggctccattccctctccaaggagatgccaggggatcccttgagggtggcaattattctttgatgtttcagccttagagactaatggatgaataatggttggtaattttgactttagaccagggcatcagcttgtatttaaggaaaacatagaagcctcaatacagagtaagtccacaatgatttcagaagacccgattttaagaagcaagctgagagctttaaaattactttctagcaatctaaatacaatcattgaagtccagtcatgggtacagagggaattgttacactattctctctacttttatgtgtatttgaaggttttcataataaaaagttaaccaaaagtaatctatataaacttagctatgagaatgtaagtgccctagtggatttaaaacaattctattctttaaaaaaaaaaaaaaaggcacacatacacaaacacacacattgagtttcaaattacatcttaaaatatgtgagccttagtttctgttccccattccatcacaaattatttgaaagtttgtgttgtaaattccattttctttttcctgatggagtatgtcactctgtggggaaaagcccattccgctgttggtacagggaactcataattccccagtcgctcgtgtttccaaaagagggggagagaaagtcacacaaagccaaggagagagaggaggatgggaagagaaggaggccgaatgcagaacagaagcacaggggtcctttctttgggatccccccccccgagactcagctgcacatccttcctcctctgtaagtgttcttgccttgaggtcattcaaacatccctgatttatagcaagtctgcagtaactttactggggctctcacaaagagttattgttgtgatggtttcagcagagcgagtactaaggaaccacatggtcaggccttccacaagctgttgctccccccagttccatagctccctggaagatggatgagagcagggaatgtggtttcacagcaggatccacagtaggccgaggccaaggtggctgcattctagagctgtgttctgagataacgtctgcatatcaggcaactatcatctctgttcggctggaaaccaggaaggcagaggcgatgcagtggctaacgcctcccaagcatctatccctcctttctgcctatccgtagcctcacccttgtcaacccctggctttcccgaggcactcagtaatttttgctcagcttacagaggctctcctcccagattttatgctggaaatatgcctctgagccccagttgttcacaaggtggtggtcttcaaatacgcacctgcattatatgaaaggaaggtagggaagaggtgtgcagcgaggaggggagccacctcccctgtgtgtgtgtttgatgaggcattttcatccaaaagaaagatggattgccaaccagaccccggcatctgacatgcaattatgtctgtgcacctgcagcttgccccatatgtaaaatctgcaggtgcaaaccttgagtccaaagacagtcctttaaatcatatccttccaaagactctcgtggttcctattggagcagagaagctgctgaggagagactgcttgagtaactcagtcattacttttcttctcactctttgttgtgctttgctcatccaggggaggcctttcagtgctgagaaattacaagtcctttttcagatcaggtacatggcttgtgtgcttttcccatgcacagtctatgcaaggggaggaacatttgttttgtgggcttgttttgaacatctgaatccaaagagagaagctgccctggtttatcagtctgtctggttctgacactcgacatctcctgttcagttggaattctgcacccctttgcatgtgcattactgaaaggtgcctttaaaaatgcagatgctctctgtctgttcccaccaatgtctttactgtagtcagccctccatctgccaaggggtagcttgcaagcatcctcaccctataagaccttgctgactactcattccagctttgcgtgctctctctctctctctctctctttctccctctctctccccccttgtctcttgtctctttaagctccaattgtacattgtccctctttgtcatttttctcattttaccatatattatggttaattgtgtacttcccttacccacattaataacaatgaaattagtaggttgagtccataatgtgagtctctgtgctaacagtcctgcatgccctgcctaaattaattcttgctactactgattctgttccaggcactttagatcaagtgaacaaacaaagctatgaaaaccactccccttctgaagcatgtgggttagttggaggagaaaactataaacaaggcacaaataattaaaaataattttagatgataacaagtgctataaagttaataaaacacactaaggaaatgaggattgctgagcatcatttgaactgagatctgaggactgagaatgagccattcaagagctctaggaaaagcaatccaggaaaagggtggagcaaatgggaaggatctgagaaaacagaagtctagggcaagtgaggtggaacagtcaggagggaggcgggaggtgagagaggtggggcaagtgggtgaggccaggtcctgtagagcctggtggcatctgggcacagccagattcaacagggagcatccatactcatctgggcacagccagattcacctggggatacccatactcacctgggcacagccagattcacctgggaatatccagattcatgtgggtatattcatattcacctgggcacagccagattcacctgcaagcacccatcacagccagtttctcctgggactatccggattcacctgggtatattcatattcacctgggcacagccagattcactggccacacccagattctcacagccaatggactgtcagatgcgccagtgctcacattccagcccctgctgcctgatgccccagggcaagagtcattctcaacatctcacacagcacaagcagctcatcctccatgcagctggcctggatggggcatccgggataccccagggcaagagtcattctcaacatctcacacagcacaagcagctcatcctccatgcagctggcctggatggagcacccgggataccccagggcaagagtcattctcaacatctcacacagcacaagcagctcatcctccatgcagctggcctggatggggcacccgggataccccagggcaagagtcattctcaacatctcacacagcacaagcagctcgccctccatgcagctggcctggatggggcacccggggctgtgcaagccctatccccttgagtctgcacaaaaaccctgtgagtttgttaatattacctgcatttcacagacaggagttcaggacacaggggggtcacctgagagtgaccaaggcttggacatcagcagcctggctcctgagtccacatcctgaccaccctcatagggtttggaggtggtgggtgtgtggtcactttgtcttgagtgttgtggagtcagccttgcccacacccagagctgagccccgggaacatgtccatgagtgggagtggccgctctccaccaacaggcaccacggtcatggccatggactgacatttccgggaagtcacttctgaagggaaagctattttgaggcctggagaatgagtgacccaagggtggaatgtcccgaccaagcatattattcttccccagagctcctcagcttggctgtagaactgagtgtggggtgggggtggggagaccgcagccaagcgagaagcaggtgacctcagcacaggcaatttgctcagctctcataaactgctatgccaccaggtcactcacatcagcatcgctcgtctgcaaacagccccagctgtcacaagtaatagggcgagggtgagacctccgtgtgttttctgaagactgttttcttaagactcttcaaaaatgagatgctcccgtcactctcaacaacaggaagaccgtgtgtcacacagttattagattttatttatgagggaagcatctgagttttctgcaacctgtcattgagcagtgtgtaaactgacagaggtgtctatctatgtccaccctggagatgccaggctggaaaatgaggacaacgatgcttccatcagaaattctgaaaaatcgtgataaagtgatagagaagtcacttctaagttctgtgatctgctttaaatgcttgataaaacataaatatgtgcctgaaagagagctaagagaacatgaacacaactatattaacccttagcaatgaagaattatagctggtcactgtcttcttctctttgtaaaaacaacctgtgcatataaaattcaacactatagtttccagataattcctcataggggtgtaacatgtatgtacaaacacagaagcttatagagcacatagagggttgaaatcctatctattcctgctccagggtgcccttgtgcttaggaggggctgggggcacacaggtctctgccctacgcagaagctcactcgctccgtcagtgagcacggaggcacaggcacgtaatgctcaagtgcttatgtgactgcatatcaagctttggtaacaagacacccaaatccttttgaagacccccctgaattccgtccaatgggagtattacccagacaccttgccctctccagcctcaggtcaagcaggttcttagtattgggcccgtagcctgctccctgcctggaatctgaatcacaggcagagcaatgaaagagcagcaaagagtggagatcatgcctacagcaggggctttcagacaggactgctcattagtttctggtcttccttgcttgattcagccagaaccaggtaggctgtttactagaaaagttcccttcatgataccatttcctgtgtgtgtgattataggctcataggaagttgcaaaatagtacagagtcctttgaatccctcattcagcttctccaaatggtgacatcttgtgcaattgtagcacaacatcaaaaccaagtaattggcataaatacaatactattaactctgttatagcttttattctattcaattgtcagcagttattatgtaaactctgattggtgttttagtctttgtcataacctgataatggagacagactctgttcattatcttaatttgtccatgaagaaaaaaggacccaaaaggactcaaagagcccaacaaatacggccaatagtcaatttcctttgatgcaggtaaaatattctgtgtatctgtgcagaaataattgcacagagcatgagtccagctggcaagctggcatccatgagagctgccagctaacgatgaccccctcccataggatgaagggatggtgaggtcctgcaagcagctcatgcccaacgccagttccagggagcatttcccccaccagccttccatgatattctggagatactggctgactatgcgaccttgtgctttccaagtgcaaataattggtgatacccccaaaacatttctgcatactatctatgagactgaaacagtagaaagtcagtgttacaagtgttccaaccccctgtaggaccatgccatatgcctatttcgggtctatgtcagcaaaagaacaaagcgatgtgtgctggggcactgcttcctgcaccgctgtgtgctctcaaatcactgggtgggattctgttgaaatgcagatgcagattccatagttctggggtgggagcctaaggttcagcctttccaccaaactctcagataaagctgatgatgctggttcaggaaccacactatgtgtcctagataatattattatagctgggttttctatcaaaacttagtcaaagtgagataacaatattcaaactaagtcatgaattaaaccaattcattacctatccaatggacgtatggaaatagaaatcaagaaactaagattttcatataaacttagactagttacttcacctctctgtacctcagagtcctcatttatagaaggggtaacaataatagcatctgccttgtatcataattgtgaggcttaattgaaaaaatacatgtaatctctgagcagaatgtcttatgcagaataagcacactgtaaattctagatgacatgataattgctgacaagagaaatgatgatgctgctggtagtggtgatgatgtcaattgtgatgatgataaaaatggtgatgatgatggggatgataataatggtaatgaggatgatggtgatgatgaagttaatggtgatgatgatggtgctgataaaactaatgatgataggctgggcacggtggctcatgcctgtaatcccagcactttggcaggccgaggtgtgcggatcacgaggtctggagattgagaccatcctggctaatatggtgaaaccccatctctactaaaaatacaaaaaattagccaggcgtggtggcagatgccagtagtcccagttacttgggaggctgaggcaggagaatggcatgaacctgggaggcggagcttgcagtgagccaagatcgcgccactgcactccagcctgggtgacagagcgagactctgtctcaaaaaaaaaaaaaaaaaaaaaaaacaaaaaaaaactagtgatgatgatgatggtgctgataaaactagtgatgatgatgatggcgatgataaaactagcgatgatgattgtgatgaggatgatggtgatgatggtgatgacgatatgatgatggtgatgacgatatgatgatggtgatgaagatggtaacagtgctactggtagtgatgatgatggtgatgatagtgatggtgatgatggtgatggtgattatgatgacactgatgatgatgatgttgagaggaggctaataatgatgaggatggtgatgttactggtggtggtggtgatgatgataatggtgatgatgattctgtgatgatgatcatgagggtgatcacagtgatggtgatagtggtgaggatgaagatgatgatggttatggtaataatgatgattttctgtatattcagtcaaatatgctgtgtgactatagaaaagtgagtgattctatcacttgcaacaaagagtaggcaacaggtggacctggcctggaaggaaacatacagcataccaggcaaagaaatggaagaaagtaatcactcaatacagatagaattgtgtctgcaaacatagattagtaacaggccagtgtttgagtggaatacctggagcttcccattcttgaagatgcatgactgcaggccccagcacccttggtttgctgaatggacatgaggaaggctgatcttctgtttcagccaggctggtcactggtgtccttgctacagtcgctgttgaaaagaagctgctgtcacaaccttggaggatgaggggataagcccagtgcttcactggagagctgtggggcttgactgactggtttgactcctgtgtgcatttcttggagtggatttattgaaggttatttgtttgtctgtgccagagtagtcacctcacagcgcaacttcctttcaagttagctgggacatttcaggcttccctgccacataggaccctgaaaaattgattgccctggaaatccaagcattaaataacatgtatggggctttaaaaaatttcagctccccttgattctaaccaagcacacttctgaattaagaaataaatgcaactcttttatgaaaaagaaaattgaacaaattgcacaaaattactgcaagaccaaaaagaaaacctctcaccgaagcattatagcaagatgagtataatatgcattataactatttaattgcattggtgatgaaatagtgcttggaacatacacaccactgtttagagaggggaacgatggcggaaagtgataactaaattaaaactagtatacattttttccaatgggagaatatatgcaattccacaagaaagaaaaatatctgtctatttacatgggtagatctctaaattgtacagaataaaagagggtggattttcagattgattccaattgattagatggtgtgttttctacaggaatatattgatatgtaaaagtttttaaagcttagaaaaatacacagggaaggccgggtgcggtggctcacgcctgtaatcccagcactttgggaggctgaggtgggtggatcacaaggtcaggagatcgacaccatcctggctaacacggtgaaaccccgtctctactaaaaatacaaaaaaattagctgggcgtggtggcaggtgcctgtagtcccagctactagggaggctgaggcaggagaatggcgtgaacctgggaggcggagcttgcagtgagccgagatagtgccactgcactccagcctgggcaacagagtgagactccatctcaaaaaaagaaaaaaaaaaaaggaaagaaaagaaaaaagaaaaatacacagtgaacttttagttttatttgaaatttctatcttttttttttttttttgccaaccattcattcatgttgaatctttcaactgtttttggaaacggagcccatgtgcagggtttttacatgggtgtattgtgtgaagctgaggtttgggatacagatggtcctgtcacccaggtggggagcatagtacccaataggtaagtttttcagcccacgctcccctattctccctcccctatccagtagttcccagtgtctattgctcccatctttacgtctatgtgtattcaatgtttagctccctcttgtgaaaacatgcagtatctggttttctgttctcacattaattcacttaggatcatggactccagctgcatccatgtatctttttgagagaatttattcatctcttacttatgtagttaatttttttttttttttttgagatggagtctcgctctgtcgcccaggctgaactgcagtggcgcgatctcggctcactgcaagcttcgcctcccgggttcacgccattctcctgcctcagcctcccaagtagctgggactacaggagccagccaccacgcccagataattttttgtattttttagtagagacagggtttcacctgtctctactaaaggccaggatggtctccatctcctgacctcgtgatttgcccgcctcggcctcccaaagtgctgggattacaggcgtgagccactgcgccctgccatatgtggttagttttttaaggtatcaaacttgaaggctatgagaaatgtcttaggaaatgatcctcttctggaatttggttcctctttgcagctgataaggagtcattctaccaatgcaagtacttggacacttactgctatgaaatgaacagacacaactgggaagaaaaccagcacccagggaagagaggaaagctagggagctgtgcttgagtaatttagggggaatggtaaattgtctagtgactcttttcacctcaagacccactggtttcttagtttcctttcccaactctgctattgcccccacatcctaaaggaacctttctttttttatatattttattttaagttccaggatacatgtgcagaatgtgcaggtttgttacataggtatacatgtgccatggtggtttgctgcacctatcaacccgtcatctaggttttaagccccgcgtgcattaggtatttgtcctaatgccctccttccccttggcccccaccttcctacagaccctggtgtgtgatgttcccctccctgtgtccatgtgttctcattgttcacctcccacttctgagtgagaacatgtggtgtttggtttcctgttcctgtgttaatttgctgagaatgatggcttccagcttcatccatgtccctgcaaaggacatgatctccttttttatggctgcatagtattccatggtgtatatgtgccatattttctttatccagtctatcattgatggacatttagattggttccaagtctttgctattgtaaatagtgctgcaataaacatatgtgtgcatgtgtctttatagtaggatttataatcctttgggtatatacccagtaatgagattgctgggtcaaatggtatttctgattctagatccttgaggaatagccacacttttccacaatggttgaattaatttacactcccaccaacagtataaaagcattcctatttctccacagctttgccagcatctattgcttcctgactttttaataatcgccattctaactggcgtgagatggtatctcattgtggttttggtttgcatttctctaatgaccaatgcctctcaactttcaattttccaaggactctgtaggtgtaagcaccagctaaagtatcactgcctgatccaagacccttttcagacacatgtgtgcattttgatgagtgatatgtgttaaggataacatttttgcccgtgatacccaatgtgagtgtttgtggagatttaaccttcagggaagttattaaggttaactgaggccctaagggagaggccttgatcccctatgactggtgtccttatcagaaaaggggagatcccagggacacctgtgcatatagagaaaaagccatgtgcaaagagagaggtctcaggagaaaccaaaactgtattagtcttctcgggcagccgtagcaaagtaccacagactgggtggtataaacaacagaaatttattgtctcatggttctggaggctggaagtccaggatcaaagtgtaggcaggggtggttccttctgagggagaatctgttccacgcctctcccagcttcttgttatctactacctgtgtttggcattgcttggcttgtggaagcatctgccttcctcttcatggggcttctccctgtgtgtgtatctgtgtccaactttcttctttttatacagaacaagtcacatagaattagagtcctactctacttcaatacgatcgtatcttaactaattacatccgcaatgaccctgttcccaaaataataccgcattcttaggtatcaggagcaaggactgtcacgtataaatttgggagggatgagggggacataattcaatccataagagatggcctctcaaaactctaagaaatccactggaatgtaatctccatgaaaacatgccccaatcactgtagtagtatcagtaccttgcaccaagtaatagctcagtaaatattcattaaataaaataataaactcaggccgtgcgcagtggctcatccctgtaatcacagcactttgggaggccgaggcgggcagatcacgggatcaggagatcgagaccatcctggctaacatggtgaaacccggtctctacttaaaaaattacaaaaaattaaccgggtgtggtggaacgtgcctgtagtcctagatactcgggaggctaaggcaggataattgcttgaacccaggaggcagaggttgcagtgagccgaaatcgtgccactgcactccagcttggcaacagagcaagacttcgtctcaaaataacaataataataaattcaaatcatatataaaaaatgccatctgtcgtacattaatgtagtaagtatatatcgagttctcatcacatgccattcagagccaggtgctaggaacacacataacaaagaaaaagatgggcacatttgatccccttgagagcttacagctttcaaaaggataattaaatacatgtatgcaacaaaatgttatcaataacctggaactgaaaatttagggtatcttctcttggattggaagcaataaatatttttaaaattcaaattctccccaataatctatctctaaccaaattcctaacagagtttttttttgggggggtggggggaagctagcaaactattcctaaatttcagaataagaaagaattagaaagaataaatagcagaaatggaaaagctaaaaataacaacttatatgtatcttatcagacatattccaaaacaataacggttttgcaagatggaaagagttctggagaattgatggtgatgatggctgcacaacggtgtgaaggtatttaatgccacagaactatgcatttaaaaataatgaagatggggccgggcatagtggctcacacctgtaatcccagtattttgggaggccaagttgggtggttcatctgaggtcaggagttcgagaccagcctgaccaacatggtgaaaccctgtctctactaaaaatacaaacattagctgggcgtagtggcaggtgcctgcaatcccagctactcgggaggctgaggcaggagaatcacttgaacctgggaggcggagattgcagtgagccgagattatgccattttactccagcttgggagacaggagcaagattccaattcaaaaaaaaaaataatgaaaattgtaaattttaggtggtatgtattttgccaccatatataaaagttgtagcaaagttataaaaatagatcactggaataagaacatactctagcacattagaagatttaagtacagaatacagtttagctgtcatgttaagagaggaggaaccatgacacaaatggtgatgggataaatcaagccttggagaaaaaagaaacttatttaaaatctcattttacatcaagcaaatccagatgcattaaaacttgaatgtaaaaagggagctgaggcgggcagatgacgaggtcaggagatcgagatcaccctggctaacacagtgaaaccccatctctactgaaaatacaaaaatttagctaggcatggtggtggacatctgtagtcccagctactcgggaggctgaggcaggagaatggcatgaacccaggagatggagcttgtggtgagccaagatcacaccactgcatcccagcctgggcgacgagtgagattccatctaaaaaaaaaagccatcaaagtgatagaagaaaatttagttgcctagtagacaacattgctgaaagaggacattttttaaagcatgacactagaaatgccaaatacaaaatattgatagatttgacaaaataaaaataaaaaccttgcatcacacacacatagaaagctatccaaggtataagtcaaattgggaatacacttacatcatatatgacaaacaattaacatccttagtacatagatattctcaacatgtgttgtgacatgaactcacataattgttttacaaaaaaggagatacatttaacctattaataaagatcagttaagaaaaagtaactacaaatgaagtaaggaaacgatcttcactcaccagattgaaaaaattcaatgaatgaaaatcacaagctggcaaccttccttgcatgtggctttgtaaaatgctatcaaaatgtaatacatgcatttatttaaatacagcaattacattgtccatagtcacacataggtacaaaaacatatgaagattaagagtgaccagtagaaagaagccaaagggacatagggcattttgatgtgaagttttgaagtccctgagtacgttttgctatgggaacagtctttttcctgcatgtggcttgtctccacaaacaggtgcttacactctcaacacatgcacaggggacagaatgactctgttttgtgcttcttttagaagtgatttcctctgagcgttgttgaacctttgaaagcttccttgtgtacacccacctgctcctatcacattcttaaagaccgattttcatgaaatgaccctaaatgattcattgcaccattacttcgggatgttcagaataatttttcagtttttgtatttttttatttattgtgtttttattctctgttttattcggttctactctaatctttagtagttcactctttctgcttcctttgggattagtttgctcttctttttctagtttcttaaggctcaatgttaggttattggttggagactttttaaaaaaatacataggtgtttacagtttaaattttgttttaaacactgttttagttatattctatagtttcggcatattgtgtttttacttttagtcatttcagagtattatctaatttcttttgtaatttcttcttttacctattgattatgtggtagtgtattgtttaatttccacatatttgtgaatttcccaaatttccttttgtcaataatttctaatttaattccattgtggtcagagggtctactttgaatgacttcaatccttttaagtttactatatcttgatttatggcctaccatgtagcttattcttgagaagatctcatgtgtgcttaaaaactgaagtattctgctgttgttgactggggtgctctgtggatttattttaggtttagttggtttatactgttgatcaagtcttctttccttactgttcttctgtcttctgggtctatccattattgaaagtggggtgttaaattctccaactattgttgacttgtctatttctcacttcccctctgcctgccttcgtgtattttgggactctgttgataggtggataaatgtttataatcattatgtctttctggaggatattttagtgttataaaatgtaccttcttacctgcagttacaatttttttcccttaaagtcaattttgtttcatgttagtatagccactctttctctctttcaatcactatttgcatgttatataatttgctgttcttttaatgtcttcgaatctgaagtgtctcttgtagacagcatatatagcatcatatgttttatccattttagccattctgcctttttatttgaagtgtttaattcatttaaatttaaaataattactcacaaagtagaatttacacatgccattttgctatttgtggtctatgtttcacatctttttttatttcttcattgcttcattattgccttctttagagctaagcagacatttcccagcatagtatttaaattgtcttactatttcttcaaaaatatttttcagttttttattagtagtttccctgtggattatagttagcatcttaacttaaaacaatctagtttggattaataccaagttaatttccattgtacaaagaaactttgcttcgataaagctttgttctctttctattccttgtgccactattgtcatacaaattacatctttacacattataaaaccatcaacatggttttataattattacttttattagttgtattttaaatcaggtgggagaagaaaggagttacaaaaaaagcacttatactgtctttcatatttacctatatagctacctttatcagcctctttattttttcaggtgaattcaagttactgactagtgtcctttcctttcagcctgaaggactatcattgaatccttttttataagtcttatgttgttttcagctaacacaataattgcatgtatttacagggcacagggtgatgttttgatgcatgtatacatctgtaatgattaaattagggtaattaacatatccatcacttcaaacatttatcactttttgtggcaacaatgttcaatcctttcctcttgctatttttgaatatacattatttttcactgcagtgaccctactgggcaatagaacaccagaactcgtttcacctgcccaactgtaactttatacctgttgatcaacctctccccatcgcccctcctccctgccctccccaggccctggaaactacgattctactctttacttctatgatgtcagctttttagatttccaatatgagtgagatcacacaatacttgtccttctgtgattggctcatgtcacttaacataatgttttctaggttcatccatgttgctgcaaaggacaagagttcattattttttatggctgaatagtactccatcgtgtgtatacacaacatgttctttacccattcttctgttgatgaacacctacatcgatttcatatcttggttactgcgaattgtgctgcaataaacatgggagtgtagtgatttctttgacatactcatttcatttcctttggatatatacccagtagtggggctgttgaatcacatggtagttctgtttttaattttctgagggatctctgtgctgtactaaggtactaatttacattcctaccaacagtgttgaacagttcctttcttgacatcctcaccaggatttgttattttgcctttctgataatatccattctaactgggatgagatgatatctcatgtggctttgatttgcatttcctggatctgtgatgggtaagcatttttttcatacacctgttagccatttgtatgtcttctcttgagaaatctctgttcagatattttacccattctttaatcaaattattgtctttttttttgctactgagttgagtttcttatataccctggatattaacgctttgtcagatgcatagtttgcaaatattctctcctaatctgcaggttgtcttttcattctgttgtttcctttgtttccatgcagaagcttcttagtttcatgtaattccatttgtctatttttgcttttgttgcctgttcttttgaagttctgttcaaaaaatccttgtccagaccagggccatgaagtgttttacctatgttttcttctaatagtttaggatcttacatttaaatttcccattctttttgggttgatttttgtatacagtgagaaataagggtctatattattcttcttcatgtttaagcattttaaagccctccatggacatcttttttccccgatattttgttgtgagtttttggccaaacttttgtttgtctcaattgatatatcatacagctgcattttaaacaattgccactgattgtttcaacaaacacccaggagataggctttgttcaatgggattgagttctgtgtcaggtcaaataacttcaaagttctaagaatggcttttcctggtgagacaggtcaaataatgtcaaggttccaggtatggaatttttgaagattcccaaacctagcatttttcttacattggctccaaagctgctacttctcacagatattgtagtcatgagttggtagtttttaagatgactgtggagccaggtagaaggggatggaagtaggtcaagttaaaagccatgggccctgctattcctactaaagttcaggagttcctcttgatcaaatgctcctcaggttgttgccacctttggtgaatctctagaattctgaaaaagttgatattgaaatattttctcagaattgttgttgctttcatgaaagggaatatttacagatgtcctcacaaaggggtgtccaattttttggcttccccaggccacattggaggaagaagaattgtcttgggccacacataaaatacactaacactaatgatagctgatgtgccaaaaaaaattgcagaaaaatcttacaatgtttttaaaaagtttacaaatttgtgttgggctgcattcaaaactgtcctgggccacataaggcccctgggcggtgggttagacaagcttgctctactatttctgaagtcctgccccccaggctgtcttggaggagagagtttccctagaaggcatacagtccttaaaagcacatttcttctctccctgttttatagatttaactgtatgtttccatcaccccaaaattcctatgttgaagtctcaacctccaatgtgaccttgtttggtgataggacttttaggaggtaattaagattaaaagaggtcataaagatggagttctacatcaactgtagattgggtaataaaaatgtgtcacatatacaccatggaatactatgcagccataaaaagaataagattgtgtattctgcaggaacatgaatggagctgaaggccatcattcttagcaaactaacacaggaagagaaaaccaaatactgcatgttctcacttataagtgggagctaaatgatgagaacacatggacacaaagagaggaacaacagaccctggggcctacttgaaggcagagggtaagaggaggaagacaatcaggaaaaataattattgggtgctaggcttagtacctgggtgacaaaataacctgtacaacaaacctccgtgacatgagtttacccttaaaacaaacctgcacatgtacccctgacctaaaataaatgttaaataaagatgaggttctaatttgctagaatcgatggccttataagaaaaggaagagcaaggcctcgctctctctccaggtacacactgcaaggaaaggccaggttagacacggggagaatgtggcccttttcaagctaagaagaaagccctcaccaagaactaagtaagctggtagcttggtttgtcttggacttccagcctccaggagaaataagtttctgtgtttagcccacccagtctataatattttgttataacagttccagtggactaagacacccaggtaatacctgtgcctgatctgttactccatgtgaaatgatctaagcttcatggtcaggacatgaattgatatatattatatgtaagggaatcatgtaatatccatttaagttttggttaaaaaaagttatagccccctatgaccaagaatattcatttctattcattttatagatattaaaacattgcacaaagttatgttacgatatgtttattatggaattatttatagatatttattcccattattcttaaattagagaactgtcattgataaaacagctgagtatgaagaatagagtatgtaggttgtagacatgagtagagtttaacaatatccacttaaagaaaaataattaaaaactccgttatgtcgatgtgcttttgtctatgaatgcatgttcattgagaaagttatgtaaggatatttatagcattggctattacacaggagtagcaaaagagagtaaagtagctttaaaaagttctccaggaaactggaaaaataagcatggtaatgtgaaataaaaagtgcaacatagaagttacggactaaactaccacagatataataaaaattgaataatcacattcacttattcattacgttcactaaataagttcagtctgagaaccttctgggtgccaggcatttctagacactgaattagcagtgaataaaatagatagtcttatgctttgtgaaacttacattctaggaaaacaccaaaggatattgaccagaaatttgctaagtgtataatagcataggaaatgagattgtaatgtttttgcttagacttgtattaccatttcatttaacagtaaaactatccataaaaataaaatagccatagttttttattaagacatgttaaattaaaaatccactaggaagggtcacaccttattgtcagccgtggacaacgtagcctgaacaagttcttattccatttctgagcatgtgagcaagaagtggttgaaaggtaggacagaggagctacagaagacccacagcataaacagactctgggggcaccagggaattgggagatgcacttcatccaggtcccacctatgaccatgaagtctatgacttccagtgcctgtgcccttcaagacaagctgcctgactcaggatactcagatgcccaaaatgatctgaccaccaccacgtaggacctcccttttttggactctcatggaatgagtactggtcctggtgttctacagaaatacagataaaagctcagacattctgccaggagccatgggaatgaggatgtttccaccagcaaaggatcagcctacaactattaaaaatgccttgttcacagaactctacaaaatagctctttatctaaaaaattgccatggcaaatatcaccccagtgaattaggtgtttgtgtgttttgcggaaagtggtatcttttctaaaagattgctacctaaataagaatgctctggagagtctaatacggaaatgaaaggatggttctgtcaactttggtgtctcttttaaggaagagaaatgtattgctctgtgctgctctcctctctctctctcttgctctctctctctctctctctccccccatctctttctctctctctcagtctctctccctctctcagtctctctctcccctcctcctctctccttttccatctctctctccctctcattgtttcctgtgctcaaactgtcagaaagtcctcaaatctaagcaatcagcctggagagcttcaggctgtgcacgccacagagagggtgtgacatatttacatatttaaagggaatgagcctccagttctcaatggggacatggtggggtttttagctttctaaggcaacatcacctattcctggaaacaattagagtgctacacaatagcccccatgcaaactccgcagtgacaggaacatgaaaggaaagagaataggggctttgcagaaacagcctcttactcgccgttgacagggaaggaaggtggaatacccactgcagtgaacacctccaatggtctcactgtggggaagctgccagccttctgccttcacaagatggatggagccctaggaaggcactattgtgtgacgggctttgtatattaagtatgtggtgttgagaactcaggccagcttgaccagccatttcccatggaggggctgcactgaattcagtatagcaggttagaaagcaatgggggttttgtttttgttttttcaaggcagatacattctgtgggcattgcccatgaaatgaaatcaaaacaatatttctcttctgttcagtgcccaagaataaggcctgtgtcgtggtctccacaagatgagctggaggctctgggggctggtgccctccgcagtcctcacacacaccgttaactgggtgaggtccaggtgccaagctctgtgctagatccttcacaggcattaattatcgttctttcaacaatccagcagcatagatggtgatgagcttgaaagtggaggaatgaagtgttttttaactttgtgtctttattatcattttccttttatatcaagaccattcagcatgtaaatggcagagctgggaggtgagcctacctcccttgctccaaaggctccccttctacaatgaagcagtgtctcgagcaggattacccacctgcacctagtccctcccactgtagatgcaggcacacccaaggagcatcctgcaagtgtgagccctgcccattaagaggctctcaaagagtgtaccatgagtgaatgaatgaatgattttacttatgtcaggaactgagagctcctggggggctgtaggttgtaacttcctggtctgcattttatccccaaggtggatgccactactttaaaagtggagtgaaaagtcctttcatagctgtccaggttgttggcttcctgggagctgtccgaggcgctgaacggatgctgctgttaggagcgtgatgttagttctgcgatggtaaaagaacagttcctgcttttgagtttctgctcgccctgaaagttgccttctggctgcagctccacaaagccagccacctccccccatttccattctgcctgatgctggctaattgcagaaactataatttgggcccagctatatgcctctgccccaccccagtgctgacccactctccacaaaccatgttctggccccaactcagtgccatgcacaagcttctttgccaaagacaatgggaaccctacagggattggtgcaaagaatcatctcacagaatagtttgaatgcacctgggcatgcctcagtgctgaggccgcataaaccctcagctcagtgtgggctggacagcagtgtcaccagaagcctgcatttttcacctctggagtaaaggggagttaaaacctaaatggagacttacaaagaggtagaaattaatccaaaaccaaaagaataagaagggtctgaggtgatgaaggtgattctgggcagagcaaattacagcaatgaagactctgaagtgggagatggggtagttgggcatgtttaaggcagacaggaggtcatggtggacctggatcctggtgatcaggtagaagagtggatggagatgagattgaaaggcatccagggaacgtaaatgaccatccagggaaggagtacacacagagaaagagctgttattttagctagagggctgaattagtggtcatgggaaggtgtctaaagtcattattaacatacataactatgttaaaatattcatttgtttgcctatttgttcattttctagcttccccagaagaatgcagtctacatgaaggcaaggacaatgtccctcatgcatccaccacacctagagtcatacctgcatgtggtccacctcaataaatatttattgaatgtggaaggagagcagcctacctgaacatatgttagagacaaaatcattttcagcacacaagtcagtcacagccttgagacacgtgggctgattaatggggaaaatggcaggggcagggaatcacactgcaataaacttcccctaatcccatctcttccctttcagctacagccctttcttgattagagaagcaggaaaagttaatatgtggagatttttcctccccttccctgcctccatgagcaccattaataatttagtgcaatctttcttcttattggtgcaagttatttgtaaaatgtcattatccaaaccattcactacatttgggggcatagcacatgctgaatgcctagttcccttctgtgggaactacctgcacacagatcattaccaagcactgcttgctctctgtaactgttagtgggtatcacacttacccacagcttgttccaaagatggttcttgtatttgcatgttgccccatatggggggagttggtagaaatcctcaacatcttgcagccgtgagttttgacctaatgcaatgtgtaatacagaatagaaatctaataataatttggtaaattaaagaaggaatgtgttgatccattacgtgctttttttttttttttttttttttttttttttttttttttgccaggtactgcactaggcttgggatttgggagttgaatatgacccattgaagttgtcagtgcaactcctactatagtaggagagagtaagacaaattcaggcacaagtaaatcacttggcaaagcaacttccatgtcataagaaatgcagagcagtggcacaaaggaaagaccatgagtatcctgagaacctcgtctccttgttctctgctctattctcagagctgggaaatacatgtggcatgtaaacaggcattcaatgaatgctagatacaagaataaaactcaaaatttatttaccaaaaaaacatatctggcattgagcaatatctatctcaactatgtctaacagagaacaattatataatagactttatttttagaacagttttagatttacagaaaaaattagaagctagtacagagggtccgtgtacaccccacatccaattttttgtccaattaacatcttacattaccatgatacatttgtcacaattaatgaaccaatattaatacatcattaactacaattttggaggatacccctctattggaattcgtttgatgtcttctcatggttagactggagttatgggtttgggggaagaaagccacagaggtaaagtgcttttcctattcttgattacaggaacatctttggctttgtaagaaactggtaaagtagctttaccaatgtgcattcacaacagcagtgaataagagttcctatcacatcatatcaaaggtacatagtatatgcatgacattactgcctgcctgcatcagccttgatcacctggctgaggtagcgatggtcaggtttgtctgttgtaaagttactctatctccccctttccattctataatccaccctatggatggatggcttccatcctgtactctatggaaggaagccactatgtgtagttaatacctatggggtaggagtcttgcttctactcatggaatcctactcatgaaggcagggtatctgtgtaaattatttgaaattatccttcattggaaaattgtcttttctccttgtttatttatttgttcattcatttaaccattaatttatatcaaaataggttagtggagatttattttataagttgagttataacccatgcctttattgctcctttagttggcctccttggctcagctttggtcattaggagttttcagttggctcctgtgctttttgagatagctttgtcaatgtgtatgttgttttatattttgtatgtttgtttgttttaagcactttcttcctttttggccctacaagctgcttcagacccatcttgtatattacctcctccagtcccagaatgagccatttgtttaaggatccctggttacttttattggagagtggcactagaaatgaagatctggacattagatgtgttcgttgctacttggatgccactatttccaggccttatcaactaacagagcaagggaatatgtgtatgtatgctaattcatgtgtatacatatgcctatgaatattttacctatatctatatcaagctaaacatgagttccattgatgtctccaaccctaatccacaatcatgtggttcattctcagctcctcctcttgcacctctgtaacatccactccaacagtgagcaacctggcttccccatccaacaatcatttagttaattgctcaattccagtatacatgtagagtgacctcaagactatcatcccagactccatgggaaataatttcaccaactagtgtatagtgcttgtatatcttttgccattagtcttacagactagttgtttagatcagtacctttcttctcccaactccttgttcagggttgattcgtacagttgcagcccaattagattctcttctcacatggttcctccctgggatgacaaacctcttaaatggtctttaaagcatttgtattttaaggtttattcttcattctcttaggtcctatggattttgacaaacttataatgtcatgtctccaacattacagtatcatgcaaaatagttttattgctctaagatactctgcacttcatctattcaccatccctctcctcttgaacacctggaaaccactcataaacttaatatcaatacagttttgctttttctcagaatgatatatacctggaatcacacaatatggagccttttcagactcgcttcttttactatgcatttaaatttaagccatgtttttcaaggcttcatagctcatttcttgtttttctccccatggaatgatattccattgtacggatatactacagtttgtttctccacccacctattgaaggatatcttggttgcatccaattttgtttgactataaataaagctgctataccttcacatgcaggtttttgcacggacataagttttcaaatcaattttgtaaatacctaggagtacaattgctggatcatatggtcatattatgcttggctttgtcagaaggtgccaaactgccttctacagcggctgcaccattttacattcccagcagcagcggatgagagttcctgttgcttggcagtctcgtcaggatttggtgtcactgttttggattttagtcatcctaataggtgtgtaatgaaatatcaccattttagtttttaattttctgatggaaaatgatgtcgagcatcttttgatatgctatctgtacattttgtgccatgtctcttatgatatgttttacattttaaaaaattaggttgtgttcttattgttgactttttatgacttctttgtatattttgtatacaagttctttattagatacatggtttgcaaatatttctccccatctgtggctcatcttttcattatcttaacagtgataatgaagtttttaatttcagagcagaagtttttaatttcagtgcaatttatcgattattttctcataaactatgctttttggtgctgtatcccaaaactcattgccaaacctaagatcacctaggttttctcctgtgttttcttctgtaagctttatagcgatacatttcatttttagactcatgttagacctttttttttcaacttttatttaggttcagtggacatatgtacaggcttgttacatgaataaattatgtgttgttggggtatagtgcacaagtgatttcatcactcaggcagtgagcacagcacccaaagggtggtttttcttctctcaccctccttccaaccttccccctcaagtagtccctattgtctgtagttccactctttctggtcatgtgtaggcaatgtttagctcccacttgtaagtgacaacttgtggtatttggttttctatttctgcattaatttgtttaggattatggcctccagctgcaacatgttgctgcaagggacacacatttgccaagggggtgtcccggcctctcagtgtttcctctcctctttttccagctatgaggcaaccctgctgtttctgagagctctacaggaaaaaactttctgaagacacctaggcttttaaacatatgtatgtgtatacatatatagatagttagatatagatatagatatataaccagcacacccatttagaaaagatgacccaaattacatctacatttagaccttgtagaaaccttactatcatgttaattatcatgctaatttcacactcaaactgttcaactttctcccaggagtttgaaatgtcccttgtgccccttagcagacaactggccttccccccagctgagtcccttggggagggagagctatgcagccctgggtgcatcccaggagaggctggattcctgccccggggccacctgatctatttacctgctctagcaaaggcagttgtagggtttcccagactaattatcacctgattctgcagcaggcacattacaaggtgtggagcaggggccatgtcattcccgctgttgtcttacacgggcaggactcgtaggcttgctgtagagcaaatcatagcagctccgtggtgaaagggcaccatcctaccctttagagaacatagttgtggatggaaaaacagccttgttctcaggaaaatgtcaaatgactattctgaaagcaaaatagaagctaacttcaatcttcaggaaaatgagagatctgagatggaagtgccatattttgcaaagtagacaaatcttttcctctgaagctcctcacacggtctatgtgtgaaacccagtgaaacccaagctggtgccctaggcacgcaaagcacctgcctcagaatctactttttgctggcttctttcaatcctcccaacttcatttctcttcacaaaacgtgttcatggtttctgctcccaggaccctgaatttccacttatctaactccatcagtctaactcgtctcaaaattatgtatattatatataattatatatattattataattatatttataattataaatatattatatatgtatatatatatatatatattgcttaaactgttccagctttggctgtcgggagctatatcagtgggtgcctgtgcctcttggacatacccccatctatgtgttattgttttttaacttttaaagttttattttttgagcatttctttgttttctgacactgtaagatgctacagactcatcttttatattcttggcaccagtcctagaatcagcgatttctcctaggtgccctgctttctttacaggagaacggtatgagaaagcagtaactgggctctaggtgtgctccctgtgaatactgattgctgttggcctgttcagctgacagattaaggagacttatatgtgtatactgtgtatatgcacctatctacaaagatttctatgtgtatactaacagtgtatatgcacctgtctataaagatttctatgtgtatactgtgcacatgcacctgtctataaagatttctatgtgtatactgttcatatgagtatatctacaaagatttctacatgtatgctaacagtgtatatgcatttatctacaaagatttctatgtgaatactgtgtatatgcacctgcctataaagatttctatgtgtatactagctgtgtatatgcacctacctacaaaaatttctatgtgtatactaactgtgtatatacacctatctacaaagatttctatgtgtatactaactgtgtatatgcacctaactacaaatattcctatatgtaaccatctgtatattattctacacatgaatgcacaggttcagtgtttcctaggattacctccatcgcctcccaaataatctccttgctctcgcatcctcatctctcagtctgcttctaggggagcccaacttaacctagcatatctctggacctgggagaatctccaggccatcttcccaaggatgatttgaagttctgtctccacccttttcctgacctcactgtttggtcttctctgcccctgcaggctggttgggggtagggcttcaggaagactccagggtccccttgggtggtgatgccacagctgtctctttggatgtccctaggatatactgcaggttttcagcagcaccctacaaagatgcactttctttatttggacaaaaatcttctgccaaaagactgctggcttcatattggcaggatgctcagcagcccaaaagtggccccagtttcctcatatgccttggctgtttggctgagctctccagatggccttcagcaggtccaacattacaggttgcctcactgcatgacacaatctctgatacacccggactcttctcttctggctcctgcatgtccctttcttcttcctgccttggtgacatggctcacattagtcctcctttccagcccccatcccaccacccaaacctgcctaccatccccttaggtgcaactgaaaccttccctaccaaccctgctcccaccatgactcttcatggagccaatcctcttggttccattcatgaatggaaagtagttttggtctcccatgctaactttgatccattggaagcaactatgtggagaagaagtctgagaccagcttcgagcttattggtgtcagttagaggtgtctgctacctggtgagcagtagcctaaatgaagctatcccatccccctcctccaattgttcatgtaccatttaacatgactctgtcattaaatcatgagctccttaagttggtcactctgtggtgcatattttttccttctttgtgcttctctgactcatgtatctagactttgattcactcatctgagcataaagctgagttatgaggtttgcattcatagatattttgggagtgcatgaagcaacaccactatatacacctgatgagctaaaaatgtgttcatgtcagctggtagcttacagagtgttaaacatgcaatcagatatacaggattttaaaccattttcccttctgttctttgagttctctgttctacaaaccttcttcttatgccatagcacatttgattatgaaccttccagccaattttccctaaactcacagagtaaaccaagagggaatgagcatgtgcacttgattctgatgggatataatttgagttgttcttttaatatttgagtttaagtcactcgttgtgcattggactaaatccagcaacaccattggtcaatgagatttgactttgtgttttatattgtaaaataaaatgcaaccgaccccatgctttacttaaagaaaggttttagtggaagaaaaatagtaataataaaccaacacattctaaagcctttcctgaacttctactgcagtttgtgaaaatgtgattcatgaggatgtattaaatattaaaaccagtgtaagacttaatccaaatttgtagggcagctttgcttaatttactgtctatcacaaaatttcctttgcagatgacttttgtctgctgcataaataataaaacagtgccgacatccctcaattgctttaccatagcccagtattaaaattgaacttgccgacatttaattctctctaggatgtgtgtccccttttctcttctctctttcttatttctttaactgggatacattataattctatcctgactttatgagttcaagtgcagaagctggaggcagttttcaagagtcaggcccatgtttgtcttaaccttgaaacattttcttggtagcaaaagggtaagtattcagacggacaagttcctaagaatactcaaattgaaggtgtcacggaaacaaggatttagcccctttcctcagccctcttcaaaaatcttgcctctattaatgaaccatattgctactaaattcagtttcatttcacattttccatgtcgcaggtccatccatcatgctcccaggtggatggagaaagaggttattgcacaatcagagagttctctctgccagggaatttactgacaatgttcacttgtaattttcctcttattaggaaagcagtaaaacactggaagccagagggtctccctggctgcagtttttcttgccagggtgggtgatttgatggaagcttcgggagacgtggtgcctaggagtcgctgatgggagttgggcgattgcaaaggagggactttagcaaaccctggttaagtacatctttagggaatggctgggtgaagggggcgtttccaggcagccagagagggaccgtgaagcctaagtgcagagagtcgtgctcaaactcgctcatctctgcatcctcagcgctcagtggagcacatggcacgtgttaggcaccaggtgtatttttgttggatgggtaaagagaggaagaccaaaggagacatggaaaaagggcaaccccttctcatcttccacaggtcccactgcgagtcagaggacaaaggcgaggaatgaggggaagaggttgcaaaatgagaggttcccatggcctcacagctctccttccccacacagcaggggttcccaaacttggctcatgaaggttgagaatctgggtcatctcaaagcgaagaggactgcaggaggtagtgaaccacagggaaacatgtctacaagaattggacccagtggaggaaagagaagggaatcttgtgcctctgagccttgtgcttccaggcccctgagagtccctggccctctgcaaacccccaggacagagtaaagactggaaggacaagctttcccaccactccctccctgcagaggactcagggaagataaccctgagttgtcctaattggcactcagctccagttctctcttcatgtgttccttctcgcattcacactcagcagcatttattgagcacatgctgtgttcccagcacagtactagacacagagaatattagtgaacatgccagtccctgtactcttggagctgacgaccttgttagggaaacaacagatattggataagtaatgacacatttgatgagtatttccaaaggacagactacagtggggacttagcctccaggtaagttctggctgtgggaagagggcatggtaggggctatcagagggtcccaaagcaatggagaatgtgtgagaaccacctcgttccagagagcacctttctgctgcatggaaggggctggtgagacagtggctgggtccagcctgggatggaagtctccatgaggctgcagcagtcgcagggtgggggagcccagcagggtctcggatactgaactgaggaactgtccagcctgagggccaggtcagggcctctggtgcagtgggagaatgaacaggaagctggtgaaagcgtcataggaatggggccagaaggggaatggcaggggaggaggctgagccccctcttcaagcctggggcaggaagatgcttaactcatcccagaacttaactcctccctcacgtctacctctgcatctgggcagcacttccaggacctactcagcttgggggccctcccctgcccccttctcgtccccattctaccctcgccctatctcagctgctctccctacttcctctgtagcaggagagacctgcctgactcagaattcaaagcctaaaatacaggacttgatgcagacgagcaactggctcccttccaggggcctggaaatgccacttgttctgtgttttgatttgtttttattcttgttttagtttctcttaagaaagtaatgcttttctaggaacatgttttttcccagtgacaggatagtatggtgactgaacacacagcttccagagtgaactgtctatgtcctaactccagttctgccacttcttaccttcacccttgggtgggtgactcaatctcaagtttctctgtctatacgctctatacactgagggatcacagggatcttatttcatagcggggttatgagagttaaaaaggtgaacccatatacaacttaaaataacacctggcacgtaacgcatgatggaaagtgttttcaatggttgttttcatgagaacaatggtccagctctgaggttcatacattggccagtaggaatatggagccaggaggaaatctcgctgactggcatccatgcctgctgcattgagcagcaagtctgctcaagacaaagcaggactgagaaaatgagacaccatcccccaaaccaaaaaagaaatattcctgttagagatgatgccatggggctttacgggagtggctgagaccctgaccatcctgtgatctagttctgctggaggtctctgtggtcagggatcaggtgaatgtacaagcatcatagaagcaaaccacaatcaaagctctttctattctcatccctagatttgcctctcctcaaatgcccctttttttcttcttcttgggccttaaaaatctttctgcagtaataacatatgcaaggaggtggggacagcatggagcatctctgaatgcatccgggactgcctgagagccaactgctggaatgagatgttgctttggctctgtctttagtcaaatcgtatgactcgcccacacttcccagaggactacagattatgagcttcaccatgaaaggggacagtcctttggggatgaaacaaggtggaaaagtagaatctaggcattccaacatctaagtctgagaagcggaaaacgaggaggaggcgctgggtgccaggatgatgctcttagtcacttgtgtgccttccctgctatgggacgctcattcctgtaccccaataagagaccaaatccaagtttcattaaaatttcatgaatagtccttgacacagtcttccttccactgtggcatctcgagggtacctacatcctcaccatccagtctgtgaggtgtgcctgaccagactgaagggtctcaggacagggccagggcttcttctatgctgtcgcaggtggacttcacatatggtgtttcctggagatggctctcccaaggcgtttctctaactttgtactcataatttgatttttattaagtagtaagaaaatctccacatttgtgcatgactcagttctggaaaaatctagatcttcccatgcaactcatagggatttccatatccaggaaagcagcatcagggtcacccaaggagttattggaaaacacagattgccaggacctctgtacagccccacttcaacttcggagactttgactctgtaggtctggagcggaactatttaaacgctgctagggagggtctaatgcttgaatattgcacttcaactagagagagaaacttgtggaaactactttcactggtgtccaagagatgaatacttagtaggtaacaatatcttcaagctgctactggcatcaatgtgaaaagcagcccatagaattgggaagaagaacagagaaagtgtctaagatggcttttaggccatatccatttatcagctatccactagcagcttcctagggcccgggtgcaggctgtgcactggggacagagtagggggtggaggaacagtatcgcccttccctgccttactcctctttctcccattttgagattccacctgctcatgatcccctctcaaatggccatctcacactggtcatcacccagggcagcctcttcccagtctcttgattttctcattctttggtgacagtgaagcccaggactcgggagttcaggatcaggactccaggatggcttggattaaacctggccctctctctctcccctgtggtgtggtcacaggaaagctgcttaatgtccttgagtctcagattgctcatctgtgaaacagataattagaacctctcactgtggagtggctgtgactatcaaacggcctcacacggtgtgcagggctgggaatgattggcatggagttgagaagtcagaaaccctctgtcattaacatccagttaccttgctgttgggcccctcatgtctcaggccactgggtaggagttttggggtatgaagacacacaaaataaacaagcaacatcccctgacttcaggttgccatggcctctgaagaagggcaacccataggtaattatgatgtggtgtcacaaagaaagagaattagatgatcctgaataaaagtcctgagccttgggcagcagtgagccatgggccagaaggattgcaatggtaagaccagtacaggaaacatgtaggggactcaagtcaccatgcagggcttgagcgtggtgtgcaaagggggaggccagctctgtggagtgttctatgccccagagctcctcccagggtctggctatgaccacatccatgctcagctctgtctcatgtctcatcccacttcccccacccctttctcctgagcagtgtcccctattaaatcttgcatctcagggtctccttctggagaataggaacaaaggtaaatgaacctgaaatctggacctgtttctaacatttagtagctctgcagccttgggcagatctgtcgagctaggaggccatcctcattttccgtttgcagtctccaaactatttgcacaaatcttggctctccttgatcatcacaataaccctgtgcaggtgttgcagtaaaacaggtcctgcggcctccaaatacagaaaggtgacatgtaggaggctaaggttccaagcttctaagttgcagagtcagggctctgactcagccctacagttgcaagttcagcaccatccacccctcccctttccgcctccctgtcctagtctaggtgattgtgaatttcatgacagccaagttaaatatgtgaaagcatgatacacatcagggatgttggtataatactttgaatatataataacaagagcagaggcaaaaatggaagctatgatgacaatgccttcccatgaagagaacaggaagccacggggctgcatttccggcaggttcctcccagactgtgaaatctccttgtacctgatctcatagagagatgctgtggaaaattatagacgtgatcagctttgcaatgatagaaatgcctttggcacctgcttctctcctgagattccctgaaaaaaaaaaaaaaaaaaaaaaaaccttaaagcaaagagatccacgtttgggtaattatccaagtagccaaaggggatcctaggtcacagccactccaacttttagaaaaaggccaaggagtgaatcaggacttcccataaacacttctctctgggtgcttttatactgttgcatttcttgttgttcctgttaggtctggttctaacttggttcattaagaacataactaatgaggctaaatagagacagctaatacctgggcttggtgaatctgcacaccttgccaccttctcctgaactctcttctccttgttctcctgctctccctcctccccttaccttcctccttctccccttccctcctctcctccttctctagcaccataatttttcagtatcctcactgccaacatctgttactgtatttttactaaggtccatatattgtcattccaatcaccctttattgttaatttaattacaccctttgtacagatgatctgccattcagagagtgacatagcttgcccaaggtcacacaaatgctaagcagataagtctaaattcaaacttggtctccaaacctaccaggtccacaattctacaaattctgaaatccacccgtcacaatgaagacagcctggccctgatctggtcccatgtagaggagagcttgcaatgcagtgggaaggctagcactgtcccttcttactcccctgcaaagactttcccaattgttgcaggctttcttctttgtcgtgactgactctaggccccaggaccgagaggtccagcaaaagccttgtcccagatgcatccctgaagcttgtccacacaaatcctttgatataacagcgccttgaagggctttatatgggcaacagtccactaggggagctcccaacagcactgttgatggtgggaagacactgaagagtgctgaagagcttgtctggaaagggctagaggaatcggtgctgtggtgggcacgcgggaactcaatgacactcttgaaaatgaaatgagatgctggtgtgggaagctcccagctgacgttccaaatcgtgggtatagtgtgaacctttggaataaatgaaacatatgcacaggtgaatacagacatggactaacatagacttctagaagaaattactaagaacaaaaacaaaaacacctgccactcctagggagagctttctttggggagaagaatctaaggcgagatgggaccctggggtctgcatttgtcttttctagagtcacaataaaacaaaagtaaaatgacctcaagaaagtcattttcttcctctcactctcttgtgtgggctgctggcttcagcctggagttgtggggtttgatgggttcagcccagagccccagacactctcccatccgtctgtttctcaaatcctccagcccttctaccccccgcccctggctttgcctgtgccaaaccaaccgtttagggtgctcttcatctccctggttgcttcctgccctgcagagacaccctcgagcttcagttgtcccctgcccacctgacctaatagccagtttcatcactgtccccgcaccctgtttccctcttacttctctccatatgtgtaagttcatacgcccctgtccgctaactgtttatgaccttttcctctctctgtgctccacaaggataggactacctttgtttcattcattggtgcagagccagaatccagcccagcatctggcaccagggggtcacctgcaaacactccttacatcaatgaattaagggatggcaggaagcatcccaagcacagatcaggatgcttcttaaatattcagctctgcagcttctcattcctggttttcagacctttccctgccttgacttttaattcccccatcagggcggacagaatgaaaagtcttctgacacttggtttgtggtatagccagagctcaggggctttgcaccgcatggagtccgggtttgaatcctgctgctgccacttgtcccaagtgctgctccccatgtgtgactggactgactgcatccatgagctcagtttctcttctgtcaaaagggctcatgcacattttctcagtttgttctcaccgtgaggtaagcagacctgcaaccatgtctagtcacattgtagggggagtaagactgacaatatattgatatgctcaaatgtatcattaagatttaactatgggaaggaggtatctgtcattataaaaataacaaggcagaaaaatagattattagcttaacattcacggggaaagacaaaaggaaatttctaagttttgcattgttttgatcacaagcgtgtatgcagaacacttccatagacaccagccagccttgtgacaaatagcatcaccgctgagaacaactggatgatcaagagcagctaagaccatccattcttaaaaatagtaacatggacactcagagtgtgggcctgagagactctcgagagatgcgtgggctggagagaccaggaccgaagaagggcgtgggccgtgcagctgggactccacccacctcttcttggcatcagtttctgaacgtgtggaaatcagttctttcagggacagctctcagccactgctgggcaaaaaaaaaaaaaaaaaaaaaaaaaatagtcagtaaatattctgtgttcctcatcccttcgtgtgacagctcggagacattttctttggtaattgcagagtccccacaggactgggtgccctcctgctcattaactcacctgtgccggcttgggtccctccccacctcacttccctaggaccgctgcggctccctggaacctctcccacacaacccacaagccctcaaatctttatctcagagcctgtttctggaagagcgtgatgtaaatagtgcttgaggcctgcttggcaacttcagaagccccttcccctacaagtcctggtgagctcctagaggcaaagttcccctagccacatgtccacaccgcagtcccgatctacccgcctgcgttgctgcagggagacccaggtccctgccacgtgagacacccagggaggggaggtgcaaaggtggtcttccgcgcattcccacccacttctgttcaggactattcttctcaaagtgaaaggggaaaggcgggggtgtcagggaaaacagtaggatccctccctttggtcttaaattccattaatcagctccctagaagccactgggaaggaggattgagtccccttggcattaccagtgatccctgatcctgactcaaaagccacttcctgctgtggagacgtgagggcaagttgctggggtttttacgccgagatacttagttcatcacggtgtgaaactcacttctccaaatgattgacatttctaggacaaggaagccttctaaactatgtccatgagttcaatataaacccacttttcattcagcttgatggtaaaaataatgtttcagacaattttggtgtccgctgcaaagtggaagcctctgtaaatgtgcaatgagaaaagaaaaatctttaaaggaaaagaaggattcagaaataagcaaagaaaggcatatcactcaggaagagaaggtccacaaattctccatctctcacgttcagaatgtgccttccacacggcttctctgcacctgagttctccaaagacaccttctgatatgcggtgtaattacagtcactgtgtgtgagttccgaggaaagctgtggggatttgcagaggaaaggcatgttcctgggcgttgggtgtgtgtgggccatcataagggtcttctcattatttaatttacagattaaaacagagcccttaaattaactatattttgcaggctgaaaatgttgtttaagagccatttcctcattgaaaatagactgaatgctgtggtgttgagcacagcttcacctatgaatttcaagtgatggaaggggttgagctcctgcattgacttcaccatgaggagacattttttcttccttcccaaaaagttagcccatcctggtaactcttgtcagggtcttgacattctgacaggcacagtgtgaaaatatgtgggattttgtgcttaaattcccagagaccatgagccaggaaggataaggaactggagacgggctttgcaggtttgagaagcttgtatacttttggaaaataagtatcatctcagatattttcaactctgcagataaacagatacctgcagaccgtcccagtttctctttgtttaaggcccctactcagcccagagcccctgatctttagcaggtgattggtttcttctcccctggtctccagccggcccaggctccagcgaaacaaccctgcaggtctccaaaagcacagaaccctgctcaccctcaaggcttttgggatgactttcccaggggctctgtgccccgtacctatgccagggtctaggccccatcctgtcttatctggcacgtctcctctctagaactcttccctgacaagctctgtacccgcagataaacccctatgtgtttctcttttggaacatataagaggattgtgactgagtgactgtccaaaccataaatgtctgacttccacgtagttggtgagctctgctcagttaggaactctgtacaacttgcaaatggggaccttgagtgcctgccgcgtgggtgcttaattataaatagagaggtatagatatggatatgatattaatatgcatataaaatggatatgacatggatctgaatgtgggtatggacattatatgaatatggatgtggatatgctatggatataggatatcgataaaatatatacatatggatatagatatgatatcgatatgtatatgatacgggttcagatataagatggatatgaatagagatataatatagataggtatataatatagatatggatacagatatgaatatggatgtgatatgaatataaatttgatatggaatggatttgatatgaatgtagatattatatagatgtgatatggatgtgaatattatatggatatagatatagatatggatataaatacaatatgggtatagatataatatagatatagagatgtgggtatgatagggacatagatataatatatatgaatatagatatattgatatggtataaatatgatatataaatggatacaatatagatatgaatttgatatgtgtatgtatttgatataaatagggatatagatataatatgggtatggatatgaaattaatatggatatagatttatatgaatatggatatagatatagatatggatatgccataaatatggatatagatgtagtgtgggtaatgatataaatatgatatggatataatatgggtatggatatgatatggacataggtatggtatgatatgatataaacatggatatagagatgatatcagatggatatgacaggaatatggatatagatttatatggatattgatatgatacgatatggaattaatatagatacgatatggatattgataagatagggatatggagatagatgcagacattgatgtagattcagatccagatcctgttatgggtactgatatagatattgagactagatgacatgtgcatagagatgcacgttgctctggatacaggtattgatacacacatagacaccaatatagacgcagatacagatattgctgttgtagcctgaatgtatgagtgagaggacactccttagacttcacctccttccacccttcctcccatgttcatcccagccagcatgctttggacaagtgaccgtctatgaggcccccatatcctcatctctgaaatagaggtgctacttcagaggatggaggtgtggattaacgagaaaagcataagaaatacatcacctgaaactgttattcacttgcagatgaattaagtgttccccaaacctggctaactgacaaggcaagtctgggatacgctggcccagcgcttcagcactcaatccatgtggacactggagttcgaaccaggaaactgttcataattggggtggtccatgcattttccctgttggcatgcccttcacttacctcaacaggacagaagaaacgaatagccagaatgaataaaaatgaggactacgtttggaatagaaatgagttgctcaaaacctcctctttctttctcaattaagcatcactacgtggaggctgccggatcaccaagcactagaatgagatggagcacaagttggctgcccagcaaattgctgccttcgccttgatgattgtacattccctccagctctagctggcttaactgcaaatatcattagattcaaaatctcactctatctctctctccctccctccctccctctgtgtgtgtgtgtgtgtgtgtgtgtgcgcgtgtgtgtgtgtgtagaacctattgatagccacaggcagagctaattaaatgcaatgcacatttcatactttcatgcaatttcacacaattatgaattttgcaataatgcaaatgaagagaaaaccaggaaccaaggtgggtgagttgtgggagggggcatcagagggccaagaagtctctggttctttctaagcttccctgaaccactggaaacttgccaaatgtccccaaccattgcctctatcaggttgttgtatgcaccaggagcaatcattgggaggcatttagaatctgagtgatccagggtcaagaggcatcttggagaggaggtggagaaaacttccacctgagcctcagagtcccgcaaagtggtcctctagtcacactccctgttgcaatcattactgagcaccaacaggctacaaggatagagcagctgaacacaggtcatcacgaggtggctcactgctttctgaatcacagttggcaaacttttgtgcaaaaggccagacaataaatattttaggttttgcttaccagatgtttctgacacaactatgcaactctgtcattgtggccatctataaacaaatgggtacgcctgtgttccaataaaactttattggcaaaaccacatgttgggtggatgtggcctgaggaccacggtttaacaacctctgatataagggatcactggaagagtgttttagaaatacctgaccaagtgtattggagagatgtagagtcaaacacataaaaacatgaccactcaaagtgacctcagtggaacaatgggtctagttaagagtttcacttctcagactgaggtaggaggtgggactcaactccagaggcggggcttgggcactgaaccagattgaggactagctaaaacagggtcagagcaaaagcatctttccaaaaagacactcccaccagtgtgtcaacttagtgttgtcaaggcaacaccactgcccctttccatggcaatgatccaatgacccaaaagttactaccccttccctagaaatttctgcataaactgccccttaatctgcatgttattaaaagtgggtataaatgtgactgcaaaactgccctgagctgctcctctgcctaccgggtagccctgctctgaaggagcaatcatggagctgtgacaccgcacctcaataaagctgttttcttctacctggcttatccttgaattcttttccggacaaagccaaaaccctcctgggctaagccacactttggagctcccctgtcctgcatcaagaccactgcctgagatgaagttcatcctctaagggctggaagtggggaagctctgaagtggcctctgcacaaatagagaaggccacatggatggtgactcatctattaattggatattcctttggaagtttaaaggctaggtgttcccaagaggacaagctttgggggctccacacctactcctagcaactgtactctaatcttctgatttgcaatggggctgctgtaagtctcagtttttgaatttctgaaacacagattaatcatgcaactacaagactatccttgtaacccagtgccactaaagtgatctgggaatgtcccttccgtacacctctacagacacaactaagcaaagctttcatagtaatatcagagtagcagccaggtgtatgaatagaggccagaaaccaagagcacacaggagctttggaggcagaaggcacatatcgctgtgactgcagggtagggcagcggtggtagggcatgaaccacaggatgagagaggtgctccagaagtcttcttgtagagcaagagaccaatgttgtgctttttgttcatggccctgttgttgcatgtttctcagctgtacagcccataaatgacatcttggctttaagagataaaaacccagccatagacttgtctcatgtcggcccacacagagaaactcctgggggacttggtcattggacagaccatggatttagtcttggcaaatagatttagtttccccaaccagctgaaagagggtctgtttctgttgcagtctaatcaatgcacatatgggttgcttgttcaataaaagaaacttaagtggagatatttaaggaacttgagaagtattcaaaaaatctaaagcaaaaatggtttaactgcagacactggcatgtagttcttaaggtatacaattaggaaaatttgtacagtaattaggtcagttaacgagagttccatgttcatcctcttcattagctaagcctgagaatttttcttttcttgcccaacatctcaaaattcttagtttgagctgatttttctgataaattcttagaaatttctggttgaggccgggcacagtggctcatatctgtaatcccagcactttgggaggccaaggtggatggatcacttgaggtcagaagtttgggatcagcctggacaacatggcgaaaccccatctctactaaaaatgcaaaaattagccatgcatggtggcgcatgcctgtaatcccagctactctgaaggctgaggcacaagtatggcttgcagctgggaagtgaaggttgcagtgaggcgagatggtcccattgcactccagcctaagtaacagagggaaactgtgtatcaaaataaataaataaataaactaataaataaataaaggaaaatttctggttggcatgaggtcttcctattaacaaaagctgacaggtgagcattttatgtaccaggagtatttgccaagctgaccccagtgatcccagtcttttgccaaaacaggtgcagaccatagaaagtatagaacctggtcaaaccaaaagcagcccctattcacaatacagtgcccctctatcgtgggactctcctttgcttggctttctaacttcagctcccactactgacatcatcacactgctctcagtctcggcctctgctctgaagagcatggtctcccctgctccacactgcacaacccatcatctttcagacatctctttctcagcttgggttctctttcactgtcttctctactagtcgtatttctattcatctttctgcgtccaactcaaacccttcttctcccaagtagaaccttgtaacctctgtaaacttgcatcctatcaaacttcttagtgcccattttcaatagtaagtgtcaacgtttgtttttaattctctctctctctctctcttttttttttttcttttgagatgaagtcttgctctgttgcccaggctggagtgcagtggcgtgatcttggctcactgcaacattggcctcccaggttcaagcaattcttctgcctcagcctcctgagtagctgggattacaggcacaccccaccatgcctggctaatttttgtatttttagtagaaacggggtttcactatgttggtcaggctggtctccaactcctgacctcaagtgatccactcaccttaacctcccaaagtgctgggattataggcatgagccaccgtgcctggcctaattctctctttcaatacatagattttggtttcccaaaaccagtgagcatggactgcattttatatgtattcaacaagtgtttattaagtaactaacatcagttgttcattatttgtaacttaaataatatgaagtcaattggcatgattaaagctctatggtcttctgcaaaacagcaatgatcagttaccaattgctttctttaagtatagcgtggagaatggagttgaaagtgaccagcattgtggcctttgttctggggggtgcctgccatactgatggcagctgctgctccagacagcctgtcactgccatcacgttggctgcagcagggaggcattgcctgggctgcacgccccatggagccagcgggagccccatcccttctgagttggggtgggagctccctgggtgccgctgcagctgcccaaactgcctgcagacccaggccactgccccattggcctgggaaggccccctgcccttgcaggctcagaagtgcctgctcccactgcctggctgctttctgctgttggtgtctgctccaatctcagaaaagttggggcaaaacctgggcatcatgaatggcagcagaaggcagataggttcctgggcagaaggggatgggtccctggtaaagccaatcccatggactggaatgaagacttgtggtgccttttctgtgtcctcccatggctgcccatgagccggctggcacacactttctcccctctgtggtccatagaagccctgggctttaccagagcaggcagagaatggagagatgacaggatgaccagcagcagacaggagtgggaagaccactgcagatgatggctgcagagatgatggggacaacctgatggtggagaagagccaccctctccagagtctctgctgcgagctgaacacttgatgggatgacctgcatacaaagaggagctacccattgtaagtctcccctgagctgttctaacactcaataagcttctctgtcttgctcaccctccacttgtctgcatacctcattcttcctgaacgcaggacaagaactcgggaaaaggtgccactggccacagagatttctgcccagaaaagcgacaccccaacgatcctgtaacaataccaatgctattatcccaaaataagctggacatattcctcagtgtggaattttggagaaggcggtagacgcagcattgcaaggtcatgtttctacctgtactctgatctgttttattggctttgtaatttttctcatactgtctattttcctctcaataaaaccttagaatgctcttcaatatgtaagataaataaaagccagaaaaacaaaagtttgagtggtcacttcaccaaagaatatgtacaattgaaaaataaacatatgaaaagatactcaacatcattagtcactaggaaaacgcaaattaaaatcacaataagataccactacaactattagaatggttaaatttaaaagaaaatcccactgtaacaccaaatgctggggagaatgaggggcagtaggagccctcactccttgctgatgggatgagtgacatatcatgacacagccactctggaagatagttaagagttccttataaagttaaacttaccgtaactcaggaccacattcctaagactttattggagtaaaactaaaaaacccctgttcacacaagaggctgcatgtaaatgtttgtggcagctttattaaacatctccaaaaactggagacaataccaatgtctcttaattggggaactgaaagacaaatggtggcccaaaatagaggtcagaaataaaaggaaagaactcttgattcatcaaggaagaatctcaggtgaattacgctacttgaaagaagctagccccaaaacactgcatactgtatggttcaatgtatacgacatacatcttggaaaaggcaaaatgacagagacagaaactagatcagagattgccaggggctgggtgggggatggaatgttctgtatcttgattgtggtgctagttacatgactgtacacattcgtcaagactcacagaactgcatactgaaaaggttgagttgaactgtgtctaaattatatcttagaaaaaaaaatatatatatatatttttttttgagtctcgctctgtagcgaggctggagtgaagtggcttgatctcagctcgctgcaacttccacctcccaggttcaagcgattctcctgcctcagcctcccgagtagctgggactacaggtgcacgccaccacacccagctaatttttgtattttcagtagagatggggtttcaccatgttagccaggatggtctcaatctcttgacctcgtgatctgcctgcctcagcttcccaaagtgctgggattacaggtgcaagccaccacgcccagccaaaaaaaatatatttttaaagctagcaggtctgattttaattaagatttggaagtctacctgcccaggcttcccaaggtgctccagtcagatcctgggtcaccaccaagtcccacagaaaccagtttggagacctgtagactagctcctcactgagccatttctggatctccaactctctgtcatctttcacctgggaccctcatgggaggtggatgcagcagattctctgaaatcctacttttgaacactgtcgttttcatcagcaaagccacttcctggactgctcctatgtccaccacccagactgtccagccaggctgggcaccttcctagggcaagactgtctcagcttgtctgcgtggactgtcagcctccagtctagagggagggaagtacagggctgggcctcctgcctcttttcctatggagggtggggatggcattgcacgcacatcaacctgatgctacagggcttggcctcttgccttgtgtcccgtggagggcggggatggcattgcacgcacatcaccctgacgctgcacttgccccagaagtcagcactcagggattttcctccaccatggggctgcctgaaaatggaaatgaattctcagcacaaaacaaaaagacaaactggtatgatgcctcagagcatgttcgtttggggtttttagttgttttaaaattttcttttcattctaataaaggacagctttgtctttaatccacagatatggctgaatcgctgttttccaagcagcacacagaaaattatcctacctgaggagcggagtagtatccatggagacacaacaccaaggccttcagggtctcataggctggcaggcccagcaaggagcaagcgctacggcttgttagtaagaggcggctaatgagagagcctgttactgactctggggtccctgaaacacctttcactggggcctcgctcattcctgggaggaatgcagttgagtggtttgataccaggcttgagcgggactgcaggatttgactcctaacccctcatttgtggctgcaggatgctagacaagcacttaactcctttgagctcttctctgtaaaaggcagactgtagcacctaccccctaaatgtattgaaacgtttcaacaaatgtgagcacagaatcagtaccctgccgggtccacactgagaaatcaatgacagctgtgattaacttcatgcccatgcccattgggtccattcaagccaccgagccccgtggttgagttgggctacaggccgccctgtccccaccaacacagcacatctcggcggtcccagacaggcgggaggatggaccctgagacagcaccttagggaaggcgtgaacgcacgggaatctggcgggcatctttggtgaggttccaccttctcttggcagagaccttggtggaatcccgggactccctctccaaggaaaccccatcagaggggccctggtgggtacccaaagagcagcctaactccagggagaggcaaaggacaagagaggccgaggagccaacctgacgcctagaaatcattcaatatgtatgtattgagtgagtgatttaacgaatgacctttagagtacccatagctctccacttcacctggctggctgacaccacatacagacatctcaaagacacagaaggtagtggaacagagcggtgacttgcaggggaggcgcacagcaaggccatgctggccccccacaccacgcagttcccaagggagctgttgacaaaaataactccttttgtgttctgacttcccctttcacaggcctgaccaccatgtctgccttccccttccttgctccccggaatcctttctgttccccagaagtgccacgatctccctgagactggcctttgctctcgctggtgcaactccctgtctttggcatcacccatgatgacttcagcacaggactcaggtcttggttgccatggcaccgatcagaggcccttcaccccagtgctgcagcctaacacagtgctttatcacgctagtcacttcccagaatcaccttgtttatggttgacttgtgtgctgtttgtcttctccaactagagtgaaagccccatgaaggtgagattttcatagttgagttcatcactgactccccagtgcccagaacatgcctgaggcataaaaagcatagatgttggatggatggagggaaggaaggaaggaaggaaggaaggaaggaaggaaggaaggaaggggagaggagaggagaggagaggagaggagaggagaggagaggagggagggagggagggagggggaagggagggggagaaagggatggaggtagggagggagggagggaggaaggaaggattatgggtatttggatggatagatgaacatggccgggcgtggtggctcccgcctgtaatctcagcactttgggagtccaaggcaggtagatcacaaggtcaggagatcaagaccatcctggctaacacggtgaaaccccgtctctactaaaaatgcaaaaaattagccgggcatgatggcacacgcctgtaactacacaggaggctgagacaggagaatagctcaaaccagggaggcagaggttgcagtgaaacaagatcgcaccactgcactccagtctgggcgacagagtgagattccgaaaaaataaataaataaataaataaataaataaataaacaaacaaacaaacaaacaaacagatgactgcatgcatatctgcatgtgtaaatggatgaatagatagataaatgaataaatgtgtggataagggtatgcatgtgtggatggatgggtggatggacggatgggtaagtggatgatgggtggatgagtgatgggtgggtggttgagtgaattaataggtggagggaatagattgatggatagacaagtgcctgggttgatgacttagccagtgggaggcagatgcttctctcctaggactttctgtcttccaggtaaaatgcctcccagctttgtgctgatgctagttctcacaatgaggcaaattcattttatatcatgcaaagaacctcaactttatggggaaaaggccatccttggcttcacagacaaaagtaccccaggcgggttgccaggacctcattccatgcctccagttcgatggggcgcttggggctgagtggcgagagcagcccctgagcaatgtggtgatttctgaagtgtgctttccctggctgagctcactgagctttcatctttgtaattacgctgggacacatttctcattacagacaccaggagaaaccacaagcaagcaggcagctggttaagcaagaaagagcaaagcaaagattgacctagtttggataaagtgggatcttacctgagtctttcccagatggaaatcacacaaaaccagagctctctgtgtcttgcacacacacagattgtttttcttcactctcttttcttttacagtgatttttttttacaagttttgttctattcaaattgagtagaagtataaagaatgaaactaactgggaaaatctgaatgttcagcatgcacaaagccgcaggcactcggcgtcctctggagcctctgcctataagtgtaggtttgaacctaacacatgaaagtctttagaagagttcagattaatatatgtacatgatgcatgatggatctggggatggctggagaggtgcggggagggcggcatgtatcctgacagctcattttggctcagtggctggagtcataaccatggttaccagttcagggtctccagatgggagtgaccagggcagtgagaagctcaaaacactagcaggactgagaaaggactgagaatgacaagcccagagtaaagcaactcagcagccgggacatgtgttcatgtacttgaagagctgcaatgtgggagagaatagtttatgtgacttcagagggtagaactcaggctaactgataaaagtttcacagagggacagatgcacgttttgaaaatgaagcccaaacttgtccccgcagctggccgagccctgcacaatgaggccgctgtcttaggaacaacctctcctaatgctctccttgtttgctctgctccagtcacaatcgcagaacttcctccaacacaccttgtccttggtggcatcaggacattggcacttgctgttgtctctttctgaaatgaaatcccctttcccttactagggctggatccggtttaactctttactcagagaagtcctccctgaccaccgtggctgaggcgacgccccagggtcattctctgatgctgtgatcatctgggttcctttgattctcagcatttatcactctctgaaacaaacctgtgtatgcgtttatttcttcattacctcacttaacgtgtatgaagacgggctgcatctctcctgtgggcctcctatgcccagctcctaggagggtgtctgatgcacagaagggactcagccatgacagactcagtgagtgcatgaatatgcacagagcagagatgctccagcagggtccgagcaatgatgtccctaccactcagaaatcaaaggaccagctgtatcaccttcacacaagagagaataagcctcacccacaccagcgagacagcagagcctgcagctgcatttcaaacctgagccggttctctagcctgcagggattcgaggctgagaggtgtgcatttcaatcataagttttgtttttgaaaatcctgagatttctggcaattttgttaatatttgatgtatcaaacaataatcaatatctctcttaggacacttttagccatgactttatattaacctattttatctcaatgtgcatttgttctggaatgaaaatccagtgtttctaaattcagatctcctaggttccatattttcaactctacaaaatctaattaaacatgagtttagaaaatgatcattatctctcacatcctgggagggtccacacaagcgcttctccaggggggcttgtcttgagtcaagttctactcaaggccatcatatgggcaaggccaaattttaatccagtgatgggggtggtggagggaagcttatttttcatattaagacaaatacagatttgtagggcaaattcactaagattttaaagaaaaggcttcaatatttaagacatttcacaatgaggtgggacacttctatgctatttttggctttcaataaacccaaatagctagaagtgaccgtatgacatcattctggccaatgagtttgattcagaagtttgtgggaagagagtcctgttgtgaataaaatggcagcgccttctcctgcctggtgtgccatgatgatgcggccatgcagacgaaagcgggatcaggaaggagaagcaggatggtggaatgaccttgtccattgacccaacagccctggcccgaggctgtccaactgtggacttgctgtaaccagagaagctacccctccccttggccgggactctgtggtagaattttccagaagtgacagctgagtgcagtcccagatggaaatgcctcgtttggcctccagaacagaggcacaacaatgaggtcccactggggattttcagagctcaggacaggtggcaggtcacctctccagaagtctctacaggacagagttcagagaggagtttggctctgaggcaaccaagttaggctttactggagctgccgggaaacagtaatggtggaagaaatccccaatccactggtacagcaggaaatggcttaccgcaatacgacttgcttagggcttacaggtgccgtctcgtatccatgaccgggtcaaacatagagcctccacattcccgtgctttgtctcataaaagattagctgaactgtggtttccactggtcaatcagaacaaagtgctcgctaactgactcaactacgctgtagttaagagtatctccacaggaccctggactccgacccaccctctgccggacagatcacgcagcctctgctcagacacaaagagcacactccacgagctttgcttgttcctctctataaaagaaaagcccttttctaccaggcatttgagacgcttgcagatctcagggtcagagtgagcccagttgccacagtcccttccttcaactgcgacagtcttttcaaatagcatctctccttccataggtctagacttgaacacacacataatcttgacatccccaagctgtaagggttatgggaagttataggtccaatctcgttatttgcttgtgagtaaattcagtccagggctggtgaaaggattgtactaagtctaggtagtgtaagtggtgagctctgggccagacctgacccctgctttcatgttctttgcagattatcacagctacaagggcaatcccaggtgagctgatgcaggcacacacatctccaaacacacagcatcacacgtgcacaggcacacaggaatgtgtgcacacctgtatctacagcccctggtcagtccgaggagcagcgagtgttgctttcttcacaccaccctatagttagattgacacctcacaatgagaacgaaatcaggaggccacagccctggatataccctgccctgcacaaaatcatccagttctctgtctcctctctctgtcctgctcccgctccacagccacttctaccagaggtggccttctcctgcgctgctctacccaagtaatggcaaggctggaggagtttgcagtgaccacaggacgtacaggcaaatcacccttctaggccccgtgtctaggagttggactatcagacatccctctcgagagtggaatcgagcagggtttgttcttctgtgtctggcctatttcacttagcgcagtgtcttctgtgttcacttatgttgctaggggctgagggagggaaatggggaaatagactcaagttccagttaggagaggtgaataagttccagagatctgctgaatcacacagtggttagtgttaccaatactgaatagtgcactttagaatatgttaaggggccagatctcacattaagggtttttattgcaaaataacaaactcccacacaggaacacaccagaatgtttagaggtgatggacatgctttgtcttttgattgtggtgatggcatcacaggtgcatacatatgtccaaatttatcaaaatgtataagttaaatatgtgcaatttttatcaattatacttcaaaaaacttctaaaaagtatagttaaagaatcaacttttcctgtaggaaggggaggaaagggactttatcatgataatatagtataattattttatgtgcattgcaaaactaatatgtatatcatgtatattttatgtacatagcaaaattctacccccactgcaatttaagttaacaatcactgaagactcattttgtgccaagctatgtaccaggcacctaagacaaggctccacctgccagaccccacagtgaaatggtgcagaagtggtaataacagtcaagtaaatgtaaatacatgatatatgtacataaacttataaatatgagtaggtgcatacaataagcatataaattcatattcttatactgtatatgcaatacatatatggaaatatgtatatttatgagctttatctcatataaaacttaagataggatgttgttgtccatcctgtcatcatgtgctttttgaaagtgaggaaattgaagcttaggaagttgaattaacttgaacagtaacacagacctcataatggggtatcccaaaataagactctggtggtcctattccagagccagaaatactaattgtcttattgcattgaagacagacacataaatggtcaatttcaatagaatggacactgttacaaaggaggtgtgactagatcctaaatccatcctgaagtttactcagaagggaaaagagaacacagctttatcagagaaatctaaccatccaagaatgctgggttcttgtaactgcttccatgttcagtttgctgtggtatgttgctgggtgcaaatggatgaaaaagtccagtctcatacagatatgcagttggaagggagacggatttcaacagtgtttacagatctcttcagttccttgtgcacattcttttttgatactataccaaaacttagcagcagtcatttttttaaaggttacatgcaatgcaagtctgaagttacatgaattaacttttcatgttctattaagtgaaaatccactggcctatttgaagtgtaagggaatcttttaccagtgcataatttgataacatcatgttggtcagtgggaaaacaaaagttcactatgttaggcagattttccattatgcaatatcagaaaatgaataacatttgctaatatcaccagatctcattagaaaaggcttgaagtctggggatactgccaagacaatgagtgtagatacaagttttccaaaatttttatttgaacttagaagctcaaattttatcactggaaacaaatactattcgttactttcctcaaagtgacaggctcacttcgtttatatttttaaatacactttttattttagcagagttttaggtttacagaaaagttgtgaagagaatgcagagtccacatacaccccacatccaatttccactggtgtgaatactgatacattgttattaatttaagcccatagtttattcagatgtcctttgtttttacctacggtcatttttctcacagaaaaggattctgggatgccccacagtcccatccaggatatcacagtgcatttagccatcgtgtctccttaagctcatcttggtggtgacagtttctcagacttgccatatttttgatgaccctggcagttttgaggagtactggtgtattcgtcttttctcatgctgctaataaagacatagactaagactgggtaatttataaaggaaagaggtttaattgattcacagttcaacatgggtgggaagatctcaggaaacttacagtcatgctggaaggcacctcttcacagggtggcaggagatcgaggtgcccagcaaaagggggaaaagtcccttataaaaccatcagatctcgtgagaactcactatcatgagaacatcatgagggggccagtcccatgatctaagcacctgccacgaggtccttcccacaatatgtgggagttatgggagctacagttcaagatgagatttgagtggggacacagccagaccacatcaactggtcaggtattttgttgaatgtccttcagttgagatttgtctgattttctttcttgtggttagactggggttatgggctttggggaggaagaccacagaggcaaagtgccattttcaccacatcttatccagggagcatattttcaactcttgatgttgaccttgatcacctgcttgcctcaaggagctttcatcagctttctccctgataaggtttcccttttctgtcaccccctgcacactgtgttctttggagggaactccctatgcagggtgcaacctgtacctagggagtgggagtgaggcaccccctccttgaggttggagcacctacgtgaattatttggaattcttctgcacaggagattggacctaatttattttggtgaagatttgcaaaatatccaagtctgaacaactgtagtttatctgtcagttaatctttcaagtaaaactgctgtttcttgaaaaacagagcagttcagtgctctgctcaaatgagcgtaccgagtttttccttggggcagccattgggtcctggtaagccacagaagacccttaggcccatctccctcatcatcacacaaagtgtttgctcagagcacccaaagttcaagaattaataaaattaatactttttactgtttctatgagtcagttcttaagtgatattggcattgctttattttcctgaaaagcgtggtgatgaagggtgcagggatggcccatgctgttcagtgccccatccttggtccatgcaaaggtgccagcacttttgcctacagttgttcttgccccatcagtgttaatgccagtggaaaagacagataatgtcatagtatgattgtgaaaatagttttgactttatgaacccttcaaaagagggtaccctagaggtaccctggaggtccagggggtacactttgggaaccactgtcagaaggtaaaaacgtagcttcctcttgacctagttaaccttagctctccaggtctctcagagagaatcaagatcaacctgctgtagtcaacctgttgctctccatggtcctacagattctcatggtcaccttgactttgctccagctgttcctcatttctgatgctctcctgtaccagaacaatgggtgcctattggaaaagtcaccctgaaagccccaacgccacctccccaaggccccaagtcaggaaaccgtaaagtcttcctcctggttcctttttgtattcattgtcccccagattttaaaaatgtctcctgccttattactgattaattcattgaacacttattaagcaccctattgtgctggtccctgggctcattaccttgagtgtcctgctcttccgaagagagaagatgcactcagcctttccaggcaaataaaacattaaccctttcccctgagtcttaaaaaattttattttgagccagagttaaattatcagcatatataagcctagttattaattacattccttctcattaaggaagtttccagggtcaagttttcaactgaagtttctaggcagtttgcccaagtaaggacttcattaagaaccaaggcaaacattaaaaaaaaaatgcagagagctcaaaagggacaaggaaatggccagggaagatggaaagccacgttttcctaatttactctctcacctcgggctccctctttcgccctcttggatcttggttgttggggatgaagagaggccagctttgaagggatctcagtcatacctctagggctctcaatctggaagtatttccaggagatggaaggaagaatgccaagaaggactgcctgctcgaaaacgagaggttggttttgtgattctgtctattgcgatagattcatctgcaagaaacagaatcaccagctaagaatgcattaaactcaaagacatgcaatcatctcacttaacaaaacgtttggagggagaggatcttgggcctgatgcagtggtccattgaggacccaggttcttcctctacttccactctgccatcttccctgtgttgctggttaagcctggggctttctgccctctgtttgcacagctttgagtgtcccatgcaacgataaccaaattcgagacaggaagaaggaaggagcaacttctcctttcctcttttaatcagggagtaagctccttctgagcctccacagcagtctccccttcatgtaccattggccagaaatggttccatgctcaccatgagcccttcctgtggcaagtgagaatgatgtcaaggtgggaatgcgtggtttatcaagggcccagcttccctcagcaggtagccgcttgaaccagagtagggtttcctgagctgggaaggggagtggcaatggtcacaggaaggtacccagcactgttcagcatggtaagtcaaggagacccttcccaggtccatgtgaggttcccatagtgtgaggctaccaaccatccatgttccctgggagcaaaagaccccttcctactccacctaacagatgcaggcatcccagagaagcaaagcgcccttcctaagatcaatcccaggtcctcccaaaaccaacatccatgctctcagcccttccttctcgttgaggatgttatggagaaaataaaagaatcaactgcatgggccttggactagaggttccttaaacagacccattctattcctgaaattctattactttaatcaatcaccatgataccaaaatgaaatgcatttattcactgtcattgttgggtaacacaaattaatatgtagatacagatggcactgagtattttgaagcaaaatacaatgtatatcaaagaagcaaaaaccatgtacttataggactgaatagtttaagcaaattcacagcatcattgggtgtgaatttgttgagcagagcacagccttttgcctagaagtggcaatttttgaacagcattagttaaaaagataaacctccccacaaaggagaaaatttctaagacctatatagtaacacaatgttttatggggtgaaaagtcatagagatgacagatgagatgagatgagatgagatgagaggaattgatggatacaaggacagatataggcaggtggagcatcatcgtcattgcatattcacccacccccaacactgaataatagtaacatccagatggaaatctcaatgctctcaggacacctgagggcatcaaaacttttctaaggccccaaagctaactccctctgaagggttttcttgcatcagctcattagtaagattcttggtcactttctacagtctccacccagttttgaaatactgagaatttcaagaattaagatgagcgaactttctaatctgccagtgtgaacataactaaaccagcttccctgggaaaaccacaacttctgaagaagccacatctgaatgctggggtccatcaaatgcacgtcttgcatttgaaaatcaagggtatcccccagaggagcctgcacctggagacacactttaaaccactcattcctctgggagagaaataaattcccagtattttagtaaattgctgcctaagaagggcagagaagagacaatagagtcggttgcttcagttccttgtgacttcagaaaccactcaggagaccggaaactttcccagcttgttataagattaataatttctggggtcttgcttacacagaaatggaaaaatagaagattgtttcgtgttcatcttttcttcccacctcatgcatttttcttctcaagcattcacactttgcctcagctgaagagttatttgattaatttgccgtttggtttattttccttgtgacaccatcttgccctgcagtgtcgctgggcaccctggcctcacccctggctctgagcccatgggtttggattctatcgctggtctaggcagctgactccgctcacacttctgattctcccatcgatggtgccacctgctctgctctggaagcttctggttccttgtctgccagcagagacattcacacctgcaccacaggtgcacccacatgaagaggaggctgctcatccactctctgtgccccctactttccttgttaccaaaccctcagaatcatttcatcaccatccaaattaatgttaatagcacctatcatttcttggcattaacacattaccctaacagtacacgaaagacgttacatgtgctctctggggcaagcagagtcctaagatggaccccagtgagtcctacccttgtgcaatcccctcaccttgaccctctagcataagcagagcctctgagttgcttccagtcaacagaacacggcacaggcattgggatgtctctcttggctacatggcaccccacagagatgtcatcttcacagactgcactggaagaaacccctgctggccttgaaggagcctccatgtcatcagagggtctatgagagttggcacccctaagacctgagaacagctcctggctgacagccagcaagaatacagagacctcagtcctacagctgcaaagaactgaattccagccaacagccatgtgagctgggaagagaaatcagaggagcactgcctggctgacacctccgccaccagctgaaaccccacgcttgaccatgaaaatgtatcctgagatcagtgcttgccgttttaagtcactatatttgtggcactttgttctagaccacagatatcttctacactggctcatggaattctcaccacagccgcagagcacaggcagaattaatgtagtgcttctcaaagtgtggtcctcagaccagcagtgtcagcatcctcagaccagcagtatcagcatcctcagaccagcagtaacagcatccacagaccagcagtatcagcatccgcagaccagcagtatcagcgtcacctaagggcttgttagaagggccagctctcaggcctctccccagatctgctaaatcagaaacactgggtgtgaggcccagcagtctgtacttgggcaaggcctccaggtgaccttggggcaccttcaagcctgagaaccactggatcagccagctctttaaagttgcaggtgatgagaaacaaaccccaaattctcttcggcaccgcgcagggagtttgtggccttgtcaggtaggaaaatgcagaaggacgactggctttaggctcggctggatccaggagctcagcctattgttgactttgatttggccacatcatggctacaggtgggctgtgagtggagagaggtgaggtgcatcagaggacagccaagctcagaaagaggagtggatggacatcgacaggaagcaagcacagaaattgcaggtgctccccgcacagtgaacagtgtttgtcatcttcacctctcagataagcaaactgaggactccagagttaggaatgtatcagggcctcaaggctgggatgtggcagaacagaaactcaaacctgctttccttgttcctaaatgtcatctaactgagttacccaggatggcttccagaagaggcgagcatgtgtaggaagagggggcactttcttttttttcaaaaaaagaaaaagctgcaactcaggaagggaggcggccagtctcccaaagttcacctaataagaggatatcagcccaaccatctttcatattctaaccctgtgtgactttgggttgctttgggggcctctgaggacatttttctcactggacatcactgcacggttgtccaggttactcacttccacaaagcctgatgggctcctccatgtggaaaccagagccaggtgtgccacccaagcaggtgccctcaccccagccatggcgggactgtctgtgcagcttccaacacccgcctcccagagcagcagggtgaaagtccagcttccctggggaatcagtcatttcccctcaggccagttctcagcatccctggagatcatcctagggtcctcagtgaaggcagcaaattgcataacaaaaactttatcaggaggagagtttgaaaaagcctctcttggagggccacagtgggtttcggtgaggtaaccaaagtctcctttcccaggtgaggactgaagccaattagcagctcaggggctgagacgctggcctcaaactgaaacatcagcaaattctgtgaaacttggtgagataaagaatctcatttaggactaaagaagactttttcctctcttgtctcagattctctacagatacaatcattttcagaaagccagtagcaagaaaaaaaaatttccacggttctctcatcccagaaatgcactcagtgacttgatgtttttaaaatacatattcaagatacaataaggagcttcaaatatttttagatatcatgcagtgctggagaagtgagagtgtggagaaaagcaactgccccatgctgaacccagtgcaaagcaccctgatgacagtaagaagtcagccaggagttttatacatacttaccatgatcaaataggtgtaaaaacatcaggagaagtgttgaagtaaacttatttgtaagaggcacattcaaaatttccattagaaaagttaccaagcacgtggtttatatgctcatgtaaacttttctgggaaagtctccaaatttgttgagaacatggacaatttctacctagttccagtgatgtgtttggattctggtccttggaagacagaaaaaattaccctttactgagaaacgctttcctgtgaagacactgattacagaattaaaagatgcccactgtatttccatcgtgaaacaatgcacacagattcctaagtactatttacattgttgaaaatagactgtgtgactcccaggcatgttgtggtctgtcttgtatatgtaggaggtttgctgttgtgatttttaaatgttagaaaatttcatttaaaaacagtagctcttctcaatccagtttcaaaatgcagtcacacatatgcaccacagaacagtatgattatattaatcttctttcatgattctgaacttatatgcaatacaatgggcagacactaacatctccaatttctcatgagtacttttgaaagctgcatttcatttgaaagcaatatttacaaaactctcacttggctgtggtttttgcatagcgattaattttcaatagaggaaacctggagaaaattccttcatcttttccctggttctcttggaaggattagaaaatgtggtgttagctcctgcagctttccagtaaccatttggcatgacctctcgttaccgtgttattggaaagaacacaggattctttggggaacacagatgtggcttctgcacacataccgtgctggaaggttaaactgttaatgccaaatttctttacagatgaatttaccttttcctgatgcagagatgcaactgaggattggggatttaggataatctttcagggaaacaaatgcaaacactgtacaaacagagatgggtgacgttagcactctgcaggcccacctccttgctgaaacctgcctcctttctatctgaggacagctgtcactcacttccagagtccattttaatgctgtgatgatgttttcactccaaggcagctaccacgggccttttgtcttcctgtcattctctctgcattaaaatattaatatgcattctctgaaggaattattgatgaagtatagattctggaataaaatggatatttctcatgacttcaaaactgattgactaatcctgggtcatatctaccactagattgatttgttaaggttttatgaaaagaaataggaatactaattgatattgaggatgaaaatatggcctgaagaaagcataactacaaatcattagacaaaatcaagttggctgttttagtgtggccagctagttgtacttgaaatgtgtaggatgggggagcttttgtgcaatgagaggttggggggaggtagcttttgttcaacactctaaatctgaacatcctgatagatgttatttatttattatttatttattttggaagaaggtttattgtaacactggctactggttacctcctttggttgcagtgacagaaactgaattcgaatcagcttaggcatgatggagtcatcgaccagctcctccagccgggtctaaggagggaggctcttcaggaacacctggacccaggggctgtgaggatggcacattcccctctctgcatctctctgcaatttttaacctcagcttggtatcatgacacgtgcagattccccgtcttccagaacatggagacacagtgatcaacagtgacccaagttccctgacccccgctttagcagccccagcagcaagggcagcccaagctttccaccttagggtgacctcagatgcccactcagtagtcttcaatggggttgcacagcctctcagggaactttgcctgtggtgtcacaatgattggagggtgcttccagcattggcaagggaatgagggagtcaggaacgctaaaccaccttgcacagttgagacctgtgcccaccctccatggtggatgtttacttgtccagccagagattcccagagaaaagaagcttgttaattttctgagcctaggagcgtatgctggtttgcaatgaacgtaaagcatctgtaacacacactgggttttccagaaacagacctctgtgaatttgtattttccgaagtggaaaggcctgacatcaccgggagttgctccccattttagagtcacttctgtggccgtgccttagggtcttcttgcattggtataaaggaatacctgagagtggataatctattttaaaaatgagtttaattggctcacagttctgcagacatcacaggaatcgtggtggcatcagcttctggggaggcctcaggaagcttccaatcatggcagaaggcagaggggggcacaaacatgtcaggtagtgagagcaggagcacgagagagcaagaggacgtgctgcacactctggcgacggagtctcactctgtcgcccaggctggagtacagtggcacgatcttggctcactgcaagctctgcctcctgggttcacgccattctcctgcctcagccttccgagtagctgggactacaggcacctgccaccacacccggctaattttttgtatttttagtagagacggggtttcaccgtgttagccaggatggtctcgatctcctgatctcatgatccacccgcctcagcttcccaaagtgcagggattataggcgtgagccaccgcgcccggcctcctgcacacttttaaatgaccagatcttgcaagagctccctaccaggaaggcagcaccaagccatgagtgatccatccccaccacccaaacaccgccaccaggccccacctccagcattgcagatcacaattcaacagatttgggcagggacaaacatccaagtgatatcattacagcaacaccgctggtgggctggagctgccaagggcctgtgggcaccctccctgctttgtgagtgaggccatcgcccacccacagccggccagccggccacagagcatccgtggggttgttccggaacattttcattttgaaatatatattttattatcaattgctttcctttcaagtgacctttatattacagctagggcataaaattcatttcttattaaatcgtgcgtgtaggtaggttacattatttcatttcaggagtagcacatagatccttgactgatggctgtgcaaggaggctgatgggacaaggggcacgagcggggatgactggagctcccacagagagtctcggctcccaacgcaaaaaccggaaaccatgcctactacacttgctcagagacaaagtacaggggaaaaaatggaagcatgcacagaaataaatgtggatttaaaaagcaatacatgtgtcttaggattctccagaaaaacagaacaggatgtgtgcatgggtgtatttgtatacaaaaaaatagagaaagagattagttataaggaattggctcgtgtgatgattgaaggcaggccggcctcacgcaccacagtccgcaagctgagacgcagggcagtggatgttttcgctccagtccaagagcaggtccgctctagacccgagaagcacggagacttcagtcccaaagtcagaaaatgacccaagtcctagctcacagtcgtcagacagcaggggctccctcttacctggaggaggatccgtctttctgatctattcaggtcaggcgtggattggcggaggcactcacacggcggagagcacctgcttgtctcagtctaccgactcaattgctaatctcagccagaaacgtccgggcaccccagcacccagtcatgttgacacataaaattaaccatcacgacacgcaaaactaaactcacagatcatatgcgctgcggagaaaatcttctcactacagaactctgtgcaatttaacaaaaaaaaaaagtcattcttgcatcatctagggaggtgggtcaggcgttacctgaaattttcctggttacgtatttttaggtatcaagagaaccaagggagcattttcttaataaagtgattacagggccctaatgttgccgattaggatggacattttcagaattagatttgtggagttaaaatttactgaagtcgggagttctcccccaccccgggcactactgatattttgaaccaggtaattctgggttgcggggttgggcggtcggagggcgcgtcctgttctgtgttgcggggttgggcgggcggagggcgcgtcccgtgctgtgttgcggggttgggcgggcggagggcgcgtcccgttctgtgttgcggggttgggcgggcggagggcgcgtcccgttctgtgttgcggggttgggcgggcggagggcgcgtcccgttctgtgctgcggcgttgggcgggcggagggcgcgtcctgttctgtgttgcggggttgggcgggcggagggcgcgtcctgtgctttgtagaatgcttagccgcatccctgacttccatccagaaggtgccggtaccacctccatcaggtatgacaagcaaaactgtctccagacattgccagatcttccggggagcataaactgcccctgcccagttgagagccactgctctaaaggaaacaaggcaattcacgcagtgccagctgctgattttttttttaatttaatgtggacagtgagctgcacgtgctgttagacaggagcagtgatacccacggctgttgactgagacactcccaaattccatgtccccaaagctcttaagcatctttgtgcagaggcccaggctaaaatattcatcctgctcatcttcatgagtgtagcagcatcatagcaactgcctctggcggccagcgctggcgagtgtttgggaatgagcgcacatcagcacacgccagctccaggcctggtaaacaggggtagggagaagtggccgacgacttcagcttttcagagcatgaaggggccgagtcttgaaactcaccacaagatgtttccgagaggagaatgtgatggatgctcacacattcaacatgacaagtgttaagactcatcattgaatcagatcgcattaaaagattaatataaaattagattcaaagatagctttgaaggtggacctttcccttcgcaagagttaagcagagctctaaaagcagaatcagctgcaaggcacaggcagcgttctcctccgtttcttcttgcacatggagttttcaccacgggctgaaagaaatttgccaaagagtgaatgtttcctccaagatatgcttggaatataagagaagatgccgatgacaacgccaaccaagatgaccccgtctcccaagagaagatgccaataatgccaaccaagatgacctcatctcccaagagaaaatgccaatgacaatgccaaccaagatgaccccgtctcccaagagaagatgccaatgaccacgccaaccaagatgaccccgtctcccaagagaagatgccaatgacaacgccaaccaagatgaccccgtctcccaggagaagatgccaatgacaacgccaaccacgatgaccctgtctcccaagagaaaatgccaatgacaacgccaacaaagatgacccgtctcccaagagaagatgccaacgacaacaccaaccaagatgaccctgtctccccaggggatttgggaggttcctcatgcaaacttgtgttctctctgctgaccatgccgcccaggctcccgggggctgggctttgtgctattttcccacttccttctgtgctgaatccagaaacatccctgaacatgggccctcagtgtaaacactactgcccatagagcactcagggcttgccagtactcagctcaaagctttactcagatggtttcattgaatccccaaggaaccccacaaggagggtttggtccttagcacagttctccagatgaggagccgtgaaaggatgcacacctctcccaaggccagaatggcagtgggtggtggtgctgtgatcccacactctgacccctgacaccctaaggcaaacctcgcacctgccaggctgacccacagccctgtctgcctctctcactcctcccaccactccacccctcttgacagggaggtctcctcaacacagagaggcccgttctgcctccataaatttgtgccagaaaaaactgctgtccaaagacccaaccctccagccttacctggagaagcctcagtgccttccccaccagatcttactcttaccgtctgaggccccagcactgtgcttttgctctgttaaaatagaaaccagggcatactatgtcctgctcagagctccccagaggcttaaaatagaatcccagggtggtgtgaaacccatgagcttaacttcccacctcaaaatctagaaaaagaataaatgaaacccaaagtaacagaaaaacagagtatataaatctatgaaatagaaagtaaacaataaagaaaattaaaaaggcaagcaatgttttgaaaggctaaaaaaaggttaaatttctagctagacagaagaaggagagaaattaaaaattacaaatattaaaaataaaaggagtgccttcactgagatactgaagtcatgtaatgataaaggaaagttatgaatgaattaaggctaatatgtcttaaccatcaatgaaattacaaattcttaaaatataatgtatcaaaactacacaagaagaaacaataaaaactgatttaagaagaaatatatcatgtaaatgtcctatatgttttaaggcatttgaatctgttatcaaaaagtttcccacagggcaggtgttgtggcttatgcctgaaatcctaatactttgggaggccaaggatggaggattgcttgagcccaggagttcgagaccagcctgggcaacatagcaagactctcatctctacaaaaaatttaaaaattatctgagtgtggttgtacgtgcctgtattcctggctatttggaaggctgaggtaggaggactgcttgatcctaggagttttaggctgcaatgatctattatcacatcattccactccagactgggtgaaagagcaagactccaaaatttttttaaaaaagaaataatttcccacaaagaaagttcaaggctgggtgctgcctgcctctccctcgtgcatttccttccactggcatcccactggtaagtcatccaaatatttagtgttgccacatttcaggggctgacaatgctatgcccatcaatgatgatgttctcgcagccaggtcagaaagtccatgaataagcatcaaaatcctagtttagaatctgcctcattggctcattgttggtattaattgtcataactaagttttcctagctaggacacagctgggaatgcccccaccaaagaggaattgagaggttcttgcagaattcacactgtgggagagtgaaaagaccaggatcagatagagggagaagctgaactatgatgcagctgcccaggtcttgaaactccccgagctctgcacctgggagaactctacaaagtcatcccttccagcgcaacgggcccacattcctgtgctgaccaggcattagacgaggctgcctgaggccggaagcatagctttggccaggacagcaccctccggcagaaagcaatgctcagagaagaatgtggctggaacccagcagccacgaacaccccaagcaacccagggacttggtgcctgggttctgacaagggaggaactaggtgccgtacctctgcagccactgccatcaacatacagaaatcaactgtgtttccacatcttagcaacaaaccgtggactacaaactattcaaaaataccatttataatagcattagaacacataaaatacttagtcatacatttaattaaatgtgcaagacttctataccccaaaatagataacactgtagataaaaattacagtagacctcagtagatatataatctgaatgtcctgtatgttttaatgaatttacttctgttatcaaaacgtttcccaaaggctagctgtggtggccgtgttcatggagagaactcagcatttttaagatgccaatttgtctctacattgatttatatagcccatgaaatccctataaaagccctagtatacctttttgtagaaacttataaactgatactaaaattaatgtgaaaatgcaaagaacatagaataacctaagcaatctttaaaagaagagaataaaaatggaggactctgcctacccagcttctagattgactaccttacaatgatcaactcagtgtggtgtttgcttaaggataggcaaaatgatcaatggaacagaggagagaacagaaatcgatccacccatatagagacagctgatttttttttcaaagatgtcaagataattcattggggaatgaatgatcatttccactactgatgctggaataattgcatatccaagcttattaaaataatcatcatcatctcaattcctgcttcataccatacacaaaaataaatatgagacggattagatggattatagacttcatcctaaaagctaaaattataaaacttctagaagaaaacaaaggagaataacattgtcaacttaggagaagtaaagatttcctgaaaagtaccagaaagcattcatgataaattggacttcaagattaaaaacttcaagtctttagaaaacattattaagaaaatgaaaaggtaaaccacagatcagtttaaaaatattcacagtacacatatcctaatgaaaagcctctgtaaatcagtaacaaaaagagctcaatttttaaaaaagtagaagacttgaatagatattttttctttctttgtttttttttttttttttttgagacagagtcttgctctgtcaccaggctgcagtgcagtagcacaatcttggctcactgcaacctccaccctccagtttcaagcaattctctctgcctcagcctccccagtagctgggattacaggtgcctgctaccatgcctggctaatttttatgttttttaatagcgacggggttttgccatgttggccaggttggtgttgaactcctgacttcacgtgatccgcccacctcagcctcccaaagtgctggggttacaggtgtaagccacgataccaagccggaatagatgttttaagaaaagaacatatatgaatgtccaacaaatacatgtagtggtgctaaatgtcctgagttcagggaaagagacattgactcccactgggatggcgctttttgtgttggcaagcatgggggcaactgaaactcttgggcattgaggacaaaaacataaaatggggaaaccacttggaaatggtttggcagtttcttacgaagtaaaaaggactagcctatcacccaatgattcaactcttaaattttacccaagagaaataagaataaatccacacaaaagatttgttttattcatgatccagtactggaaccaatccagaagtcatcaacaggtgaatgtaggacaaatgcaacacagctcatcaatagaagggacaaaccttcagtacctgaagcaggtggaggtcaccaatcgtgctgtgtagacaagtccaggcttgaaggagcaccctctgcaggattccgtctacaggaggttccagaacagggggaaaaaagccgtgaccaccaaaattgtatctggtttctcacatgggttgtgggaatggcatgcaaacaagaatgagtggggatgaaaatattctctatcttgtttaggacacacatgtttgccaaaagtcatggaatgtcttacttgaaatctgtgcctttgttaaatgcaaattatacctcaatgcagtggattaaaaactaaagtgaaatccatacttttccctcaacctcaaggctcccccatgacctctcctgcctcccaggatcctcccacactggtccccacgctctggtcggctggtcctcaggtccaaggagctgcttacctttggactgtgtgcatgtgcatggctccacctagacagctctcctgccatgcatctgcaccgacagccattgagtacattctgagtgtgtgtgtgtgtgtgtgtgtgtgtgtgtgtgtgtgtacgggggggtgtagtatttaattcaaggcaaacattaatcaaaagtaagacatggtatttcctagtagttaaagatgtaaattctggaacctgggttcttaccctggctttaccgtttaccagctggacaactgtaggtgagtgactcaacttctctctgcctccatttccccatctgtgaaatgagtatggtaatagctactttatagagagctgcaggaagggttcagtgagttagtacctgtgaagtgccttcagcagcatggagcacacacgacgctccagttcagtgttggcatgtctatgggttgtcctaattcaacaccgtcaggattcaaaggaatagcaatgaacttagggtcatctgtatttcaatagccatgaacttcaggtcattcacttgaggtgacctgggctttagcctcaatccttctagcagcgagttgggtgcacttacaaaagcaacatgcctggggctcatttctcacctatcagatgaggcttaggctggatccctgcttccaaattacagttcttcaaggccacatttaatatatgtatttattacttacttaacagttttctttaaatcatcattttttaacttggatatatctaacctcatcctacgctataatatcaacaaaattaagggtttgatttgttaattaatttttttttcttaatacacattgaaagcattgtttgaataccaggaaaaaatttaactgtttgttcacaggctctctcaaactgtctcacatgtcacctgttgtatgcatgttgggatacacggggctggatggtggctgagcgctctcctggcccgaggctccttgtgcctccacagtgctgctaggagacccgacagcctcagctgtgctgggaaagagaaaccacccaggcagcagcatgaggcagctgggagacggctaagctcaggacgcccagggtgctcggaatgattcaggctggatgatgatgaggacggagtttctatgggagacagttacaaaaacatcgagagaggaagaaaacaagccgcatgaatctcttcaggacagagtgtttcattgtctagtattatctaacattacaactgggaaaaaagaacgctcttagaatctcaacatgggacttggccttatatgttaataacaatcactccttattgctatcaagtgagctgaatacgtatgggatggctatttctttgtcttgctttacttccccatgagctaaaggcacagagagatcacgtgcaccatcgtaggcaaagtgatcctcccagattcaacatccttgcccagcaatgcacgcctgtgctctgatgcatcagaatctctgtgtgtcttacaaaaccctcagacatgcttcagagtaaggaggagaatgacatgataggaagccagagaaatgggcaaaggcaaggtcatttagagtgagagttgacaaacattttccgaaaagagacagaaataaaatattttaggctttgcgggccgtatggtgtctgtcacagctactcagctctgcctttgtagctcatgaaagcaaccccagataacttgcaaatgaagtgacatgcctgtgccccgatgaaatcttatttacaaagctatctccctccatgctaggcatggccttgtgccacgttcactagcaaccttggagcctgccacgggagaccacacctgcagacaggcccacttcctcactgcttagggacctgggagggccggactcctgaactgagatagaggaagaccttgcctgtgtaagctaccattacccttgtcttcttgaaacatgcagctgagcctaatcccagccaatgcaacctcctttccacccaaggacctaggctccagggccacaggggctgggtctgactctacctttgtatctcccatcccccagtttgcagcccagtgcgcaatgaaaatgtgtctcttcttgataaattatgagatttctttcaatcctggataccaaaagtcaagttaatttctttctttctttctttcttttggctggtttctttaaaaataacagctttattgaggtataattcacaaattcacgtaccataaagttcactttttaaaaatacagtttagtggtttttagtataattgggcctcattattcctagattccatatttgcaaattagcctacttacaacaatttcagttcatttctttttactcctctttgtccccaaaggtaaagccgggcccagtctctctgaacactgccgggtgcatcgtaagtggcaccagcctacagaaggatttacccaaagcagggctgtccatggttaaactgtgctagacccagtacatttcaaatctgattccctctgccaacaagtggggcatcacggatggcttctgagacccagctggcccctaaaacataaggatgagatgtgacgagggcccaggtgctgactgaatgtgaggcccggagaaccgcggcagcctgtctgagcagaagatggtcaacctatccttgtttgagtctttgattgcacaattcccttttcaaaaggtaattgaagttatttaacagctgtttgtgttggaaaagcaggaagaaacagaaagatatgtttccaaatgtgtgctgccttctcttgctccatctgaatcaaatcatgatattaccagagttttaaaatgcaaaagaatacggaggtagctgccaaaaaaccacctttctttgccattggttctttgttgaaacaaaatgcctttcccaccttttcaaagtcagaaatggagctcaagttcattgcaggattaagaggttcttgctccgcacccccacttgcctttccctgtatcatcaactcagccacgaggggctgtggctcactgtctgcctcacgattgaaaccccggctcacgggtccgtcttctccagggagagcttctcttccctagaactgcatctgtggggacgagctgacatgcgatgctgtgtactggctcatggataggaaggcagggcgcatgcatgctcaccaccaaaacggggcaagaacacggggaccagcccacgtgtaagcaactgttagattcaggaacagcccgccagagtcttccacagccgcctgctgcatttagcttggatctcagggatggcaatgggttctgggggagttcagggccacaggatgtggtgggaacgtagaggacacagagcaaaggttaccttccagccagtgggaagcagcttagatcctaggagtgtgtaaaattgaccaagaagtaggatgggttggggatgggaacatgggagggggagaggtcagagcacctgttctagtcccatctgccttcatgttcaggagggccagctgctggtttgtgcgtggcatcatagggatttctagaagtgcccagcagcccccagatattatggactgaggcctatccttcaggccacagtgaattccacaggctggccagcaccaggtagatagagtcctgccctgacactgcacgtggatacaagaagagaaaatgcctccttccttctgaggtcacaaacggagacagcagcagccagggatttcctgtggaaaggccccagatgaattcccatgcccactcatggagaaacatccagcatggcacaggtggaattgactgcctggtgtcagaaaggcccaacaggagctgacctctggccccgagggcctctgtaattctggctgagcggagcacacaccctcgcctctggcttctccagctccagaagctgatggctgttccaggcctggccacttggagcagaacagcccctttggttcaaagatgggccctcctgggacttctactggaagtaaatcccagaaagaagattacccatccttccatgatgtctgacgctctaaattaagccagcctgttgcccagggggttatctttgtcaccccaagaagagaactggggtgtagatgatgccaccctctaggaaatagagcttagagacagagtgacatctctgagcccctgggtacagctgtgacagaagcttttcagttgagacttttcagtcttgtgagcctacaaactcctgtgactctcctagtcactgctgtcactcatcaccagaagagtcctgtctggttcaatcaccgaggacaatgacatcttcgggcctcgctgtcccataggtttgtgttaaatggtgtcaccatggtgacctgccaggtctctgcctaggagaagcaagaacatgcatttcagttgtccaggcacttcctacagggggacaggatcgagtccacggaggagcagctcttgagggtgatgccccagacctgagggggacagagagtatcccccctccattcctggctcctcagaactcactgtgccacacactccagggactggtggaactgcagaaaaccggacagggatgggaggggaggcaaagacagtgctgcatagacccccaccgaacaaaatgtgattgcttgcttatttgcccttctccagctagctattccagaagaccatctgggaacccacaacaattagacattgcttagccggagcctgccagaaatcaagtgcctccatcatattataaacagcccaaagctcagtgtagaaaacacagactcagacagtgcctccatcatgttataaacagtccaaagctcagtctagaaaacacagactcagacagtgcaaaagccacgcctgcagtatagcctgtgggtctgacactcagcgctccagacgctgctcttgacgggaacgagtgtggaaattcaagaggcaagcatcttgcccgcccactctgcactcatgccagcctgtccttctgccagctgtcttgtcgtctcagtcctcctagcactctgcctcccaggaaatgtcacccaagtacactatgggaaggcaacactagtttttattcattttctgggaaaattctgtgaattcttggtgaattttcaaaagccactagacctcatttttgaataagaaaaatcacccaatagaacagagcgaggttgagtcccccccgcttatgactatattgaggtagattttacatctcataacatttacccatttcaagtatacaattcaatgatttttagtaactttaccaagctgctaaaaattacatcaccataaaccggtttcagacattttcatctccccgataagatccctcacacccatctgcagtcactccctacgcccacccccagccacagggaaccaccaatctacttcctgtctctgtgatttgactttcctggacatttcatgtaaatggaatcataatagttggtcttttgtgtctggctttcttcccttagcatgaggttttcaagtttcatccatcctatagcaggtatctgtgctttgttccttctatggcagaataatattctgtggtacagatgcaccatatttgtctactcatccaccagttgatgggtatttgggttgtttccagtttgggactactgtaaatttgtgagcaaatatttttgtaaacctatgctatgcttctcttgaataggtgcggaggagtagaactgctgggtcttaaacaacagggttgttgtgcaagcagcaaggcacttgagtctaaggtcttcaagttcatctaacaaggtgcctcagagcacaggatctgcacttgagccctggcttggccatttttgagtgagtgtcagcttgagctggtcatttaagcctttaaaacctcagtgttctcatctgcaaaatgggggtaataagagcccagtgatcactttactactccaagtaagagtttgcagaaggcaggtcagcctcctttggtgtttttaattggtttgcattcctgctttgctcgtccttgacttggagatcttatgtcttgggaaactgcctcatgtgcttctcactcactgcccctcacttggcacctctgtgcatgcacaccaggctgttatgacactgcaccccttgggccagctttcctaccctgcctccttctgattgcagctgctgtggccttgatattctcctgggttcctccattaggagctgttctgtcagctgtcacattgtcattgtccattatctttctttagctaatattcatcttgtgttctaaatgatgcattaaaaaaaagaaatgctcaatctgtacaatgaaaactataaaacaccaatgcaagaaatagaaggcaacaccaaaagatgaaaagatattccatgttcatggattgaaagatttcatattgttaaaaatatccataccacctaaagcaatctacagattcaatgcaatccctatcaaaatacccatgggattcttcatatcaatagaaaaaacaaccctaaaatgtatatagaaccgcaaaagacccaggatagccaaagctatcttgagcaaaatgaacaaaactgaaataattacattacctgacttcaaattatactacagagctatagtaaacaaaacagcatggtactggcataaaaacaaatatataaaccaatgaaacagaatagagaaccaagaaacaaatccatacatctatggtgaactcattttcaacaaaaatgccaagaacatacactggggaaaggacagtcccttcaacaaataatgctgggaaaactggatatctatatgcagaagaatgaaactagactccatctctcgccatatacaaaattcaaataaaaacggattaaagacttaaatctaaaacctcaaactctgaaactactaaaagaagatatcaaggaacctctctaggatatcagtctgggcaagggtttcttgagtaataccctacaagtacagacaaccaaagcaagaagtagacaaatggaatcacatcaagttaaaaagcttctgtgcagcaaaggaaacaatcaacaaagtgaagagacaccgcacagaacgggagaaaatatttgcaaactatccatgtgacaagagattaataaccagaatatataaagagctcaaactaccctataggaaaaaaatctaataatctgttttaaaaatggaaaaaatgatctgaatagatatttctcaaaagaagacatacaaatggcaaatacgtacattaaaaggtgctcagcatcagtgatcatcagagaaatgcagatgaaaactacaatgagatatcttaccccagctaaaatggcttttgtccaaaagacaggcaataacaaatactggcaggaatatggagaaaagggaagccttgtacactgttggtgggaatgtaaattagtacaaccactatggaaaacagtttagaggttcctcaaaaaactaaaaatagagttaccatacaatcctgcaatcccactgctaggtctacacccaaaagaaagaaaatcagtatatcaaagagatatctgtattgccatatttgtggcagcactgttcacaatagccaagatgtggaagcaatctatgggtccatcaacagacagatggataaagaaaatgtgctacgtacactcaatggagtactattcagtcataaaaaagaatgagatcgtgtcatttccaacactatgggtggaactggaggtcattatttcagtgggttaagtaaagtaagccaggcacagaaagacaaatttcccatgttctcacttatttgcgggaggtaaaaattaaaacaattgaacttacgaagatagtagaatggtggttaccagaagctgggaaggggagttggggggaaggatggttaatgggtataaaaatatagctagatggaataaataagacctagtatgtgatggcacaacagggtgaccgcagttaacaataatttaaatttacatttaaattatatacaatttaaatttacacttaaattatatacaatttaaattcacacttaaattatatacaatttaaatttacacttaaattatatacaatttaaatttacatttaaattatatacaatttaaatttacatttaaattatatacaatttaaatttacatttaaattatatacaatttaaattgtacaattgaaaataactaaaatagtataattggattgtttgttacacaaagaaaggacaaatgcttgaaggtaatcatgtacccacatgcttgagggtaaatcaactttatcctgatgtgattattatgcgttgtatgcctgttaaaatatgttatgtaccttataaacagatacacctactatatgcccacaacaactttaaataatttttttattttaaagtatttatttttgtttttattttttccattgtcccactcattttaatgaaataatcatttttcatatgccaaggttccccaatttttaagtaatttcagcagtaatttttttaaattacagaattttatttaaaaataatgatgtaaaaatcacaaataaaatattatccagcaatagcccattataagaataatatattaactgaagcttatcccaataatgcaagaaaggtctggtaataggaaatctattaatgtattatgaatatataaaaaagagaaaaaccatgatatattcacaaatgcagaaaaggaaataacatttgacatttcatttctgataaaacgtttgataaaataagaataggtacatacttttttttaaattttactattattatactttaagttttagggtacacgtgcagaacgtgcaggtttgttacatatatatacatgtgccatgttggtgtgctgcacccattaactggtcatttagcattacgtatatctcctaatgctatccctgtcccctctccccaccccacaacagtccccagtgtgtgatgttccccttcctgtgtccatgtgttctcattgttcaattcccacatatgagtgagaacatgcggtgtttggttttttgtccttgcgatagtttgctgagaatgatggtttccagtttcatccatgtccctacaaaggacatgaactcatcattttttatggctgcatagtattccatggtgtatatgtgccacattttcttaatccagtctatcgttgttggacatttaggttggttccaagtctttgctattgtgactagtgccactataaacatacgtgtgcatgtgtctttatagcagcatgatttataatcctttgggtatatacccagtaatgggatggctgggtcaaatggtatttctagttctagatccctgaggaatcgccacactgacttccacaatggttgaactagtttacagtgccaccaacagtgtaaaagtgttcctatttctccacatcctctccagcgtttgttgtttcctgactttttaatgatcgccattctaactggtgtgagatggtatctcatttggttttgattttcatttctccgatggccagtgatgatgagcattttttcatgtgttttttggcggcataaatgtcttcttttgagaagtgtctgttcatatcctttgcccactttttgatggggttgtttgtttttttcttgtaaatttgtttgagttcattgtagattctggatattagccctttgtcagataagtaggttgcaaaaattttctcccattctgtaggttgcctgttcactctgatggtagtttcttttgctgtgcagaagctctttagtttaattagatcccatttgtcaattttggcttctgttgccattgcttttggtgttttagacatgaagcacttgcccattcctatgtcctgaatggtattgcctaggttttcttctagggtttttatggttttaggtctaacatttaagtctttaatccatcttgaattaatttttgtgtaaggtgtaaagaaggaatccagtttcagctttctatatatggctagccagttttcccagcaccatttattaaatagggaatcctttccccattgcttgtttctgtcaggtttgtcaaagatcagatagttgcagatatgcggcattatttctgagggctctgttctgttccattggtctatatctctgttttggtaccagtaccatgcttttttggttactgtagccttgtagtatagtttgaagtcgggtagcgtgatgcctccagctttgttcttttggcttaggattgacttggcaatgcgggctctttttaaaaaatagaaatcctgattctctttccaactgtttttcctgctgttcttcttccttttgccagagaatacctggcttactattttttttaaggaagtaataaaattcaacctctagctagtgtcaaaaacagtgcttcacaaaaaagataattataggtagatctctaaatttacttcccaacatacttgatggaactgacctgcaaacagtagaaatgacagctgatgaatgggaattgaattaagaagctttctttgaccctagaaccctgaattttcttaaatataatatttcccggtgggccatggggagggcagagagcctaccagacccacctagagccctgaattcttaggcagatgcagaagatgtttttagccttgaataaatcagaagccttttaagtaacaaacagaaatgaaaacaataaaaactgtttctgagcttagaaacagtggcttagaactctgtgccacaggatgttggaaatactttacttttttttttttttttttttggcatctaatcctgcaatggtgctctgagacaaatccaatcggtattcccatttgacacatgaagaactgaggcccagagggactaagacatttgcccaaaattacaccgcttcacagtagttaaatctacaagcctatgcctccccgtggttcccactcttagttatccaatacacacacagaagcccacaaatcgttttaccaaatgcggtcctgcaaacactcccaaaatccacaggctaatctcactccccaccaagtgggagcaggaagattttaccagaaactcatttcttttacaacagtttttcacgtagattattttctaatcttgattaaaggcacaaacataaaataaatggcacactggatagaccaaacatcaccacacactacatgtgtattcactcagaaaatacaatttcacgcgtaaattaatttcagaaaacgtaaagcatagctggtaactccagctttgatctgaatcacacgccatttccctttcgtgtcccgcttcccctgaattgacaatagcagctgatgtttattgagaagtttctgtgtgccagatagtacttcgcgttctctcttcctcacttcagccctctgaaatcagcgctgttattaggacccccttgaataaagagaaaacggaaattcagtaagctgaagaacttcccctaggtcacacagctaatgggttgagaatccgaggtttgaacccagaacctcagatccagcagccaggcttagtccctttattaagcagcctaatcactccatgggggcatggcacctctttctgcaacatgcattcattcaacacctgttcctcaatttcccataagagctgggcatattgccaggggacacagcggtggccagacctcaaggacttaagagcaggggaaacaaacaattttaacttgatcgcaacagcgtgtgatgacatttatcaggggaaacgtcagtgctgtaagaacacatacaagagtcctgagggacctcccttaggaagaaactccagctgacagctaaagttcagagatgcgtgggagtcacatggacgtctgcatctcaggaaggtcgtactggctgcctggcagaattcccgtcagaggggaaaagggggtgcgagtacacaggagaggcaggttgggaggtgtctcagtgacctggacacctcggggaggggaggaataatgcctttcaagggatacttgggagacaggcttggcaagaattggagattgagcgaataatgaggacaggatgagaattattaggcttggaaacatttgaagacttgcacaaagaaatacaaaactaccaatttcatttccaataatgctaaagcttaatttctgccatcttcaattcccaactggtcttccaatcccaacatgtatcacaacccaatcccaaatcctggaatgactcccccactgactcccaaagtcctctttccttaagacgcccttcaagatcctccatatactgcccctactcttgctgtcggtctgactgtccatccatccatccatccattcttccatccatccatccatccatccatctgactctggcagaaacagatcaatcatttaaaccaaagcacaattccaacagcaacaagagctgagaatgaaggtcatctgtgccacagcagtggggtatagaagaggcaggtctgacatggctagaaaggctgttaccatagctttgcttctcattccctggacccagggcaactcagctccattccccaacaagcctgtgccttcgctcctctgtggtttgccctgatgacaggccttcctggagctgccttctgttctcactaggtaatagctctgtgttcttcaatctggaaacccgctaggactctgaaattatacagcatccctattaccatagggacattgaaatccagacctgaatcctgtcctcatggagcagacaatctagatgagaaagaaagacatgaatctgagatgcatgcaaacatagtgactgtgacaagagctaccaaggggaggggtgtggagccctgaggacaagaacaggactcgaggaagtcaggagggtcagggagagcttcctggaggaaagtcagagatgtgtgtccttgaaatggcattcccctgaaacttggtttccttgtctataaaatggggggacatcatagaaaatacctctctgcattgctgtaatagcaagtggaataataaatatcaactgcttgacccagagtaagtgttcaaaagatacttgttcttattgtttattactcacctgcctctatgtcaagcatatttggagctgaatccttcaaaggtgtgtttcctctaaggtttcacatgccttagcggtaaatgcaatcagagatctggtccacaacagaggctgtaataggtggggaccaggttcctgagttctggaagaagagcccaagcaattgtcctgtctgtaggtgagcaaacatcggggagcatgggtgccaactggcacctgccacctggcacctggcttcctcaagctcttctaacacaggctctcacttaccaaagtaaaattaaacatatccaatttacggagggagaagggctcaattttaactatgttttcttgtcttcggctggagttgtgacgtttcacatagtgacagccagaactcacgagaacgtctgtggccgttgtttcttctgaattctgtccaacttgttggcgtcattggatgccagcttccccagaacagtgggaggagttggcatgcccatctcatcagcgcaggacaaagaggagcctgccattcccagtgctcccggagaagcttgcttttcccaaggtggtctccatcagctctcaaatgttttaggagcttgtggccagagaggtgctggcctgactattgggcaaggcttgtggaaaggacatgagggacagaaactgagcaaaaataacaaaggccattcctgtggcctgtgggaagtgctcagaagaaactctctcccaagaccctgccacaccctgctgtgcctacttggagcgagcgcattcctccatgctgttagtcacaactcagactgaccctggcaagaattaatgtccttcacacccattaacgtcacagattagcagggacactttgtaatccatccacagctcacctcttccttgtgttcatgcacccatgcatttattaaacaagtagtcatagctgcctgttacatcctcaactctgcaaacagatgcagataaaatgaggaagaaaaacagaccctaatcctgccctcatggagcagacaatctagatgagagagaaagacatgaatctgagatgcacaaaaacatagtgactgtgacaagagctaccaagtagaggggtgtggagccctgaggacaggaacagggctcgaggaagttagggggtcagggagagcttcctggaggaagtggcaattgagctgagatttgaaaaatcagtagccatgaaccaaatgaagaaaagaggagataacattcccagtggaggaaagagcttactcaaactccccaggaaagaagaaaaggaggggctgacaaaggtgtgcccaggtgagcttccttttggagcaatagtcttgggagccacaaacaccttcttttgactcctttactgccttctcttggctgagctcatcgtgttgtgacttctctcttggcctccaaattgttcttacctgtggtcttgcaataaatggcctgttcagttggcaaccctgcacgtctgtgggtttgactccatgcatacagttcagtctgttctgttggcatgcatagattagacaaccaggacacccaaaaataagacacagattgtggttccagaaaacctgaaacggttgaggcagctgacagggactgtttggcacaaatgacatcaagaattccagaaaagataaacattaggcatctcctccactactgatcattggacaaggaatttctctgacttctgtgaacctggggtcacagtgaagttctctgaagatgaacatgagacttcacattgctaccagagctttaagataagaaatcatatctagtttcaaaaaactaccccaccttgtaaaggccagctttagcttcagctttttcaggttgtcctgctttctggggagataagaaaatagaaactacaattaatagttagttaattagttatgatgagctagcactacactatgtaattgacacacggtaacttatataactcataaaacaaccccatgaggtaggaactcttattatacccacttgtcagacgagaatactgagggtcagataagtgaagtcacttgcccatacatgggccagttggtgagaaaggggtggaacttgagtttgaagctcagctccccaagaactcactttctctgaactctgcacccccgaggtcgttcctaccatggggaccgtgccccaggttaactcattcattcagttattctctcatttctttggtgaatatttattgtgctcctagtatgttttaggccctgttccaagtgtttaaggtaaaataaacaagcctactatggtctgaatgtttatgttcccacaaaattcctatgttgaaatactaaccccccatgggatggttttcggagatgggcactttgggaggtgattaggtcatgagggtggagccttgtaaatgagacccaagagagttccctcactccttccaccacgtgaggacacagcaagagaatggttgtctatgaaccaggaagcagccctcaccagacaccatatttgccagcaccatgatcttggccttcccagccccttgaactgtgaaaaaatgaactaaggtgaacctgacacaaattcctatccttttggaactcatagtttcatgggagttgacaataagaagccaaatgaataagtaaaatacacagtgcacaggaatcctatgtgtccaagcaggacagggggtaggaagttttggggtggagaggggaggccacctcatgaaggtgagagggtattggatgtgttttctccctacatgagacaatttccaacaagactcacatttggaataatggagagggtggtatattaaaaatgctaaacattcattcgaatatttctttagtgtctgctttgtactgggcgctgatacatcactgaactaaacaaagatgcctgtgtcttaggcttctgatcccatgtggagagcccaacagtaggcagcagacaagataaaccatcactgactccacaggacgaggcagggcacagagtgtgatgagtgctgggggagtgggttgaaattgttttgtggggtgggcgaggcctcttttggaagatgacaactgagcgagggggaagaaggagagggagaggattgtgtggacactgcagaaggacgttcagggcagaggaccaactagaagaaggtctcaaggtggggcttgttacaggtgtgtgtgtgtgtggagtaatgaaggagctggtgaggtgggggcaaagtgaggctgatgggtagagaagagaggaggtctgagccctatttactcagcaagcatgccaagcgctagactgacctgacctgactgctaacttttccagagtccttcatgcataccaggggctgtgtttaaatcatcttaaaggtatgttcattttatagatgaggatcaattttacagatgaagaaactgaggcttaggttaaaagcaaactttccaaagtctcacagaatgtagccaacgccaggcacaaatggaatcctccctggcactcagtgggggtcccgaatgcttggcgagcctgcatccccaggcctccaggagacagcagggaatggagaatgggtggccctttccatgggccctggagcagctggggaggcagagctgagaggaacagggccacagggagtttgtgccctgatgtgggggagctacctagctgggttgagacccagatgaaggacacagtgcagacaggccgtagggcttgcattcttccttccctttggggagcaggctgagcttgccctgagaaggccttcaaatcggtactcaggccctcccctggcaggaggcagggagagatggtgggcgacgatgcgcctccgacgaggggcctgtcagtccactgctgctgctggaggggctttatctctaaaatacagtgttcctttagaaggtgcacattttcacatctattaaattgctttgcatgaaagtgtactttcctggtaccatagcaactgtgcttcctaatctgatttaaattttttgccttgtgctgcaaaagctaatgccacactttctgaagtcggtggctgtgccgtgcacaggatgtccatttttgagaaaagaaaaataatcatccttggctaaaaatcaccagcaccacccccgccctacaggtggctgttctatgcgaatggttacagatacaggtgccagcatcttcaccgcttcctagcgggtgattgtcatcaggttattgaacccctcggagcctcagtttcttcatctaaaaatcagaaattaaaatatttctacctcacagggctgtcagaagggataaacgacatgaagcaaaggaggagcttagttctgcatctgacatttattaagtgctaagtaaacagtaactagggatcttgtcttcctcaatcccactcctttattaagagcaataattgactactggcgatgttgccaggctgactctgaaatccattactctcggtagcggctgcaatgcggctttccatttactgcttgtcttcctcactgtaatattccaagaaggtgctcagcagtgatttgaggaagggatgaaaggcaaggctgcctttgcgtatcacgctgtgctgtttctatgtgtcaggcaggtcttcctctctcaaaatccacccccacggatctatccgacttcctttcaacaatgccagactcgatctggaggcctcaggtaggcactcgttgtggtcctcactcccagggggctgcagccccgtctcgtgcaaccttgctcacatgctggtggcatgtaggatgctattactgggagggttgtggacacatcatgtccctgtcacacagctgagagttacatcccttagactcagtgaggatgggcatctcagagccactcagctatgcagggctggactccgcttcagcctgggaacacagcgggctccacccacgggggagcagagaggaagggattcttgcatccacacacacagggttctttttttttttttttttttgagatggagtctcgctctgtcgcccaggctggagtgcagtggtgcgatctccgccactgcaagctccacctcccgggttcacgccattctcctgcctcagcctcctgagtagctgggactacaggcgtgtgccaccatgcccggctaattttgtgtatttttagtagagacggggtttcacgttagccaggatggtctcgatctcctgaccttgtgatccacccgcctcggcctcccaaagtgctgggattacaggcatgagccacccaccgcacccagccagggttcttaaactggatggcacatcagatttacggtggggctgttaaaatgcatattccaggtatcatgacaggaatcctgattcagggggctcagcctgggtccctggagccagtatttgcatctctcacctggtagttattgtgtagatatccagacaggcgctgtcgaacatctatcttagtccacttgtgcagcgcacctgctgagtgcctgggccctccagagctgtggcccgagtgccgttgggtgcctgcgccctccagagctgtggccggagacacatctgggtctgggccacacaacattcatgctgagcgtgaataagtggagcagaaaccggggggagctctgacgatcaagccctgaggtcccacaggcaccctgggactccccttgaaaccatcctgccttgaaggccctggctctctctctgagactgtgatgggcatggcaactcaaacacgtttacggtcatttttccattgtcttgataaatcgcatctagcttttctctctccatactaatctacctactagagaaattaatatcaagggtgtcacttggccacactcagttttccctcccgaacccacctgttcattcttaacataggcaggctgagaattttcccaagttttaagtgttgctccgcttttgattataaattccatcattagtttgtctcttcttacattttactgagccatcaagagaagccatgtggcactctcagcacttggcttagagacttcttccaccaagcttatttcttccaaccagtttattactcatgagttctgctttccacaaagtgctacaacataaacaaaattcgagcaagctctttgccactttattacaaggacagtctttcccccgaggttccatatcttgtttctcattttcatctgggacctcatcagacctcatatttctaccaacattctgtccgcgaccacctagataatctctaagaagactgagtctctctttccagctctcttcttctgggccctccctagaatcaccactaacactctttcatggcaatacagaatttttttttttttttggcttcaaaactcttctggcctctacccaatactcagttccaaagctgcttccacattttcaggtatttgttatagtgacattccgctgcttggtaccagtttctgtcttagtatgtttctgctgctataacaaaataccggagactgctgtaatgtataaacagcacgaattcattgctcatggttctgaagcctgggaagtccaaggtcaagaggcttgcaggctcagtatctgatgaggatctgttctctgcctctaagatgatgctgtgtcctcacatgacagcagggtgaaaaagaggcaggcagctctatggagcctcatttatatgggcaccaatctcattcattgaaaggtgggttccttagggcctcctcacctcccagagggcccaccttataataacagctccttggtgattgggtttcaacctatgaattttggagggacacaaacattcaagttgtagcaacatcttagagtttagatgctgttgcattactttagaaagtgttctttattgtttacgtatttagagacaaaatttcatgatgtttgtaatgaatattaaatatattacatacaccttaatatactcccgaaggcagaaaagacaaagtaagcacaggcacatgttaatgatcatttggggaactgtgtgtggcagttcattattgtattctccctgtgttcctgtatttttgaaatttttcataataaaaaaggtttttcttaatgctatgataagctaaagatctaagaaactcagaaatccttgtagatcttcccagccttcaactccagccagaaaatctgacgtatttaaatattggtgctcatcttgtagctgaagaaaattcagtttctaaagccttacttttcaaacttgagcagctgtggaatgatttgtttttccttctccttctttcttctctgactgacacagcaggtcgtggcatccctgggggactgcacctcataagcaaacatgactagcgtggcctgacatcacgtgccctgatgcgattctgcagctggaaattcagagggtttttttttttccttcttcttcttcctttcattctatatactgtggtttctggcaccttaggagaatttgaaaggagaaaagctgtgttctctaattagcatgaaaaatgcaaaatccatgtcccatacaccacacacagccacagggggtgctcttggcataagcctccatgaggttccttgtggctttggagcccagagtgctcatgaccacagaatctgaggtagcagagggacgtaccagggccagtcttcccaggtctctcctgtctcatctgcggaccattcggagggtgcttcggcctctttgtaaagttctccaaggatggaaagaaagcaaaatgaatcatgggtccaattagtttccatatctgaatgcctggagaggtgaggcacagctaaggagacacgagaatgtgatgagcaggctttaaatggtccagaccccaaacctggctccaccacttaccacctgtgtgccctttgtatcgttaaacctcagtttcctcatttgtaaaattagggggaagtgaattttcggaatacttttgggaggactgaatgagaaaattcatgtgaagcattagcctagcatataattaccatccaataaatgtaataataattacttttgtatagtcttatgcacacacatacagattcatcattattgaaacacctccagaccgccctctctcctgtacacatcttcgggtaagccaatcccctctgcacaaatccagggaaccacttagctccactcagcaccgaatgaaagaaagaacgcgtccatggagacagagaacatggggttttagggctgagagggaccttcagaacatgacatgcctccccccttcccccacacactcagttcttatcagcttcctgaggctttaccctgcacttagcataaatgcaagcctcatgtgcaaggcccagtagaatctgtccctcccacctcctctacctcagggaatctcagtcctgctccttcactgtgttcccaccaccctggtctcctcccagttccccccatagaaccagcaagggaggggccattgcacaagctggccctggctgggaacactgcctgcctccctcccccatcccactgcccagatacccaggtgacaaggctttctctccaccctgggtcacctcctctgcaagctcttcctggaacacccctctagaagcaagtccctgccccgagttcatgtcacccttgttgtccctttcatatctgtccttgtagtttcatctgtttgcctctgctaagtggcttgttagagatgctaccacgcatgagctccacgggacccagaagagaggtgactttgctcatggtgtcttcccaggcctactcgcctctcagtacacaaggagggagggaggggacacctgaccactggacaggaaggggagccacagccagggaacccagcttcagggaagaagctcagcccaactccgcccagagcccctcaaactctgccatttgtaggaaggaggtaagtgagaccttgcctccacctgggagacatctaaagaatgaaacaaggggctcctagggggttcccctgtggccagtcgctcgctgctgcattgctttagcagagcagtgcagaatgccatcttggtctaaatatctcctctcctggcctcttgtgctgtggggattctgccatcagacgtgttctctgcatgagtcaggaggctctcagtggctggtgacagagaccacactcaaaccacttaacaaagggagatggccacccagagcctcggagagtcccggcacctgcagcagaatctctcaggcaccctgggctgcagtgctccaaaggctcctgcccactggcttcgttttcaggctcctgggtaagtggctttagaaaagagtcacagcaggggtggcccccacagcctggcaccctcaggaaggctggcggaagcctcacggtggttttaatccggctgataagggacacgtcttctgcccaagcacatcacttggtgctcctgctggccagatgcaggttttgtgatccgatccttaccaatgcaactgccatgacaaacggggcagaggggttttccatggggtagctgggcactgattccaaaggacaggagaggcgccaccagagtggtcaaacgacggagtcccaccaccgagggtgtgctcgcaagagacttgtacacagattggtacttcctgggggtttgtgtcctcacacacctggggaacattctgtcctatgagcagcagtaatttctcaccgaggaaagaggcgttgtgggtgaggacgctaaaaccagcacaactccatggtcggggcagggactctgtgtaccctcttctccccgccaatgacattccccttgaggtcgactcagtctcaatgtccctccctgtgtgcacaaggagttgggatttcacttacgtggttgcaaagaaggtgaaaaaaaacctgtgtaggagaggctgggtatagtggctcacacctgtaatcccagcactttgggaggctgaggcaggcggatcacttgaggtcaggaattcaagagcagcctggccaacatggcaaaacccagtctctactaaaaatacaaaaattagccaggcatcatggtgtgtgcctgtagtcccagctactcgggaggctgaagcaggagaatctcttgaacccaggaggtggaggttgcagtgagctgagatagcgccactgcactccagcctgggtgacagagccagactctgtctcagaaaaaaaagtgtatgcaaaaccaccccctgaaaatgactgcaatagtccgtaacgcacaagtggcccctgtgcagagattcatatgcaggcatggtttcaggaaccactcaccaggctcaaggaaggaaagaagacagctgcccacaagcagagacttgggcattcaaatcacccagtctgcacaagtccaaatgcctcgtggagaggtcagaatggtcctgccatctgcaccctcttttctgtttgttagattctttatccttagaaccttgatccatgtacttgttatgaaaattattgctcatatgacaaagccatgttcacagtctcccagtaccagttacctgttgccataataacactgtgttcaaaaccagcctgaaaactcagaggcttaaataataagaaggaacttggccccacatcagcggagcatcagctgatagaggctagcttcagttgacaactgagagtctgaggtccaccctggctccatccgcagcaggcaggaacgggagccacagcaagcaagcgcagccctccatgcgctgcctcagcttcagcttctgtcatgttcactcgcaccccatgagcttcagcaggtcacaccatcggtgttgggtgctgcaaagttacctatcccaggtggaactcaggatactcaaggagtgaagaattaaaggccacccgatcttccaccctgacacacagtgggcactcaataaaaactgtgttggcttcaagttcagatctttcatgatcacacccacatattctgcagacaatttacccactgaatggtacccaccattcccttcttaagagcaactcaatcccaccttcccaccaagggctaaatcctgagggcaggtagcatgtacatctcatttatgttcctttcttcagcaaggagaaaagagatcaatgaacataagctgattgaccaaagaacagctggcctgacctgtgtcttcagcatctgcaatgctccaggccctgtgcaaaaaactgtatgtggcatgtcattttttaacatttcattgtgcaaattttaacaaatactaaagaagacagaatagcataaacctctatatactgccttgacttaatgatgagtaatattttaccatgtttccttcaaatgatttttgcttgaatattttaaaagtaaaatactgacaatatgacatttcatttctagtttaatacttcagtatatagcttttaaagaaaaagacatttacttataaaccacaataccattatcagacttaacaaaataaatggtcttccttaatatctactagcacgtccatattcaaatttcctctgttgccctacaaatgccttttgataatggttttgttccagacaaagccagacaacccacataagacagatttggttgttctgtcacttaaatatcttttaatctagaagagccgtgcctttttatttatgtcactgactagttgggggaatgtacttttaatctacttttaatctgcacatagccatgcaacgtaattgtacttacccccattttccaatgagaaaactgacaaagtcggtgtcatcaaaaaggagatttgcttgcattctcaaaaccacactctttctgccattgcaggtccatatcaggagaggaaaaagaaaggcactaaaactttcagtttacattgtaaaaagcaacactcacgtttaaggtgggtttctagcacattttgacacagctgggctatttctgcaaaagaaaaggaattggcaatggaaaaatgtcaattctagcctgatggaggagtaatgttgcctcctcccagcccacatcccattctgtgctgcgcagaaactatctagcaaatcaagcacatgaaactgagggttttgtctctacaaatatgggagttgtcagacagcacaaacaaccaaaatcaaagatccgattgtctttacgattttacaccctgaccatctattaagtctgcatctattagatttgcaaaatctagaccatctattagatttgcaaaaaggaagatgcttcccatggcctcatcttacatgaaaatgtgggtttctgcttctctctggttgctccttcgaagagacgtgtgctggagaactccttaataatactggggaaaaaaatatcatggaaatatccaccaggcgaattaaggattataaggcctcttcttccttcaagttcttttaaccaaggttgctttgcagagagagatttgtagaacagcttctctaaaggcaaacgctggctgataaaagctcaacagctctgagaattgggttacaagctcttttcctgtgctcgcaccaagagtgcaatgggctttcaaaattccatttcttccatattgctgcaacttaggaattcacttttgaaaccctggtgcctgatggatgaatttttaaaatttatgtccctagaatatcctgtgggtatttaatagtagatatgaaagtttccaaatatctgagcattctgttttagatctggcagcctcttataatgagctcagctagatcacccagaaagggcctctacagatttaccaaccagaaaagcagggaggagcaggtgcgccccatggaggagaagtccactgtggacactgtgcaaaccaaagtccatgatggggagcccacaaatggaaggtgcctgctaactgagaagccaggggtcacactccaaaatctccctgctcaaaagaagtttttttaattcttcagtcctcagtttaaatttttgaaactcttccaatgaacaaggttttcgcttataaacagaaactagaaaatggtataagactttgtttagtaaagctataggagatagagaagatgttttggaagctgatgcaagtctgagaaacaagaatggctcagtaccagggtttggtgagcaaagcaagtgagggctgccaagttgattttttttttttttttcgtataaaaagggtggttccttttgacgggtgatgtaatgatgcctctgcaagtcgtaagatgagatgcagcttcagcttctcaagtcgcagttggcagatctgtgccagtctcctccagtttcacagcacaacccacttccaaagagaatcccaaaactaatatcctctgaaaagagtctaagaattccactgaaaacatttttcaagcccagaatcctgaaaaagctaagccatccgtttagattccctggggccattccagtttttaccaatactcaatccacatggtatggaatgtttacctgttgaaatttttttttactaaagggacctcaatttgcaatgagataagtttagacaaaattaatcatgattgtaaacaatatggaaaagttttttatggatactgtctttcatcagtgtccatgacttccaaaattgtgaatgacacatctcagcgtgaccttcctcttaaataggacaagacttttccagcatcctcatgtagccctttttctcctcctttgcactggaatattgcaccaacaggactcattcagcactgatagtgagtttcccagcacaaagaaggagtgagcccttgagtctctcaatattggcaaagcttttcctttgccctgagtttctgctctgaagacctatcactgaaaatgcagcctcaaattcatccatggggaaatcaataacaaatcaagcagctattcactcagatttattggcataaccaggtgagacagccaaaaatctccaagagtgggttgttgattatgagtcaggcagtcggaaacaagctactgctggatttcatgctgctgtgataaatcctgctgcagccatggatcagacaagtggtaactcaaatggatggttcctcaagatgcaaaagcatatttcattccacttacatcttgatgcagctaatcagtcttaatctcagcataactcacgaatccagaagagtcttctggaaggcacaggtataaggctcttgttgaatagcctcataatttctgtgcactaaaatcctgtggggaattttctttgtcatgatttgaggaggagttcattcccaggatatttgtatggaacctcttaatgatatctagtgatcgacagccaggtttctgtcattgacactttgagtgcttagtggagctgaacgattgcacagaatgagatctggggtttagactctcggtaattttgaaattgagaaaaggggtttgatgtgagctgacaacatggcacctttacaaatgctaacatttattttgaaatctaagcctgaatttttttaaaaacatagaaataaagacaattaaatccttctcatctcttgccctaagactctgtgttctctggccagtgtcacaggggcacttgcagttttgccatctagtttagaacaaatggggcctgctacattgacattccctttaaatccccactgtgtcactgagaaaagagctatcttactactcagaggtttcacatctccctaagcacttttacagctgcatttatttataaaaaataattggaaatgactgatgtgagtcaaacttaatgctcatgagactctgtggactttcctgtcaaataacatgaatcagaacatacaggtgcacatttctggttaatgtccaaattctgtcaacacaatgcacgttttagagagcaatctaaggaacctgaattgtccttgattcagagaaaaataggttataattccaaacatctgcttcttccaaataacaccacttaaatgagaagtacagagttcacattctgaagatgaagtctgatgtttttgcctacaacaattgcaccacggtaaaatggttgtcagtggcatgatctgtgctttgcacctttggaaggagaaccagctgggatcctgagagaacaaaggaggggtagtgtgaccatggcagagaaggacatccagatgtagcctgtttgcaccaatggctccacatcatgctgtaatgacaccccttccaatgcgactcggcacctccttctatgaggcggtggaatctctgtcctcagcctttgaatgtggactggacttgcaacttgctagggccacaatggtttcagtctgaagtctcaagaagccttgagacacattatttgtactctgggaaccctgcgttcgctgcaagggcaggctcaggctggcatgctggaggagaaaagaccatgtggaggaggactgaggttatgtggccaataccagcaaacccccagaaacagggctgcctaagcaatcactgtggaccacagaggaaagagagagcccagctgagaccacgtgaaatacccaacgatgctcagcccaaattgccaggcctcagaacaaagaattaacaagttttaagcctctgaggcaattggtttatgctattaagcttcagagtagttcttcatggggtctaactagttcagaccccataatagcatctctctcacacacacacctctatgtctcccttatctccctctctcatttctgtctttctatctctgtctccatctgtctcttcccatagtctcataaattcagccaaggagccccagatctgctgtagcactttcatgggagaagagtcttatctcgacatgaaggtgggggacacaacttaggttacgtttgccaaaccttgtggtctcgggaccattttcactcttttaattagtaagagtaacctcaaagagcttctgcttatgtgggtgatgtatatcagtatgtatcattttagaaaagctgagaaaatgttaaaagtcaagaaaatgcaagtatgcatgccgttaaccattggagcgatgacgtcatcccagttcacatgactgctgtaaaactccactaaacactcataaaaaaattgagagtaagaaatgaacataacttctagtgtttctatggaggtaattttgccctcgtgtatccctgagaacttctgacttgagctgaaatgaaagaatcagctggaccattgtctcagatattcccaagctctcacagtgtttcccaactctgtctgctaggttttgcttaggatgaaaatcatcagaatgatagcgtaggcagttaggcctacatgaacaggggaggaaaagcactcccaataaccccaggaatgtccccaactatcaggtgatggtcaggtggttgttaaactgtttctctaaaataataattggttgcagctggtgccagggaatggcagtctcccaataggcagaaaatacctgaagctggttccaggtaagctctcaggagccagttgggctgaagcaggagcactaaaaggcaaaaatggcagagtttaactggtatatggccttcctctaggaacactggactggtaagggaaaaatgcctcaagtaagcatgtgcaccacttcaggaaacaccctgtgcgtgtggcccctcctaagtgctggccggtcactgcacatatggacagtccacccaagggaggaatcagaggagaagaaacgcagaccccagaagccgatgtataagaccccaagtcaaaagtcaaaccatgcacttgatcttttaagtcacctgcttggtcctcttccaagtgtactttacttcctttcattcctgccctaaagctttttaataaactttcactccttccaaaaacttgcctcaaactctaactctgccttatgcccctcagttgaattatttcctttgaggaggcaggaaccaagttactgcagacccatacagttcgccgctgttaacaagaatatcaacattaaatggcttgctcattagaatgctttggaatttactacacaatggtaaaatgcatatagttagtaagcatttatgtaggataaatgctctaaaattattgtaattattgcatctccatggtaatatttatttttaatgaattacatgcttaccttggaattcattgagctaattggggaactaattttgggaagcctattcagatcttacataaagtagcttctgctctttcttggtgataatgttttgaagaatttctcttctttccttaagttgtggtgcaatacctggtctctccctcaggaagccccttacacctcctttcaggctcatcttcaagcatctctgccatcagtcaaaccctccttctgccacttctcaattccaactcacatccattgaattccttctctgttccaagtgccttttcacaggtctcaacattgattcttcaccacactatgattcacacattatatctctgttctgtggatgagaaaactgtccatcaacttatggcaccttgctcagagtccaacaattaaaaagaaaaaaaataaagaagatgatcttcactcattctttaacatattcattcactgatcaaaaacatttagtttacctatcggtcaggtactgagctgggactgaaggattaactgatgatttgtaaagcctgaaataacctggtttagtctgagggtgtggtcagacaggcatgagaaagtgacctgcagagatgattgattggcacgtggtgtgtgtatgcacaaatgagaactgggacccctgagatccctaagaaggtacagtcacctatctatggaggtgggtgaggcttcctcgacccgtatggcagaggctattttccaaagatggctgcaacaagatctgcccttgttacaggtgtatttaaggcttctctcagcagtgggtgggcctgcattcctccttttgaatgtgggcagacaagtgacagaggaggaaatggtccatgtgattccagaggccatagaaggcgatgctgcttccacccacttctcttgagaggtcccctcatggacgcagctgtcatgctgggaggaaacccacgtcaccctgtggggacccaggcgtgaagaacaagcagcagcactgcttgcctgggatgtatgtggactggtcttggaattgcgtccttcagcccaggcaagcctcctcagctgatactgtgagaagcagagatgaggtgcctgtcctctccaagtccttccctaacagcagattatgagcagaatcaatgataggtgttgtctacggctgctgagacatggagttgtttgctgcacagcaatggataatgggaaaatgaggggaggcttgaatcaaatcttggaggctgaaggagaggggccaggcatgggctagggttggaaggctattccgagtataaacagcctcattcaggacgacatggagacagtgatcgtggagaatagactggagtaccacattccccgctaaagcaaagggtagcaaaattgtggcaggcgggggcaagaggagcagggtgatatagtgaggcccaatctctattaaaaattgaaaaaagaaaaaaaaaggaacgtttctgtgtcctgtgagttcatgaaaatcaaagagagaaacgatactagttattatcactgcaataactatgcctactattactactagtaccattactctactactgctacagataataatagttgtctgaactatgttagagtagattgggaggtgaagacctggacccagtgtctatagaccacagaccacactttgaagatattcaaatgaggagaagaaaggagagatggctggaggctcaaacacacacgccacacactgagtctgtgaaacagaaggagagggggatgggagtggatgggtataatatggagagttccagaggttgaattacatttccctgatggcctaaacttttctcaccaaatcagaagaaatgctgtctaccaaaattgtccccaaatcccgtatcttgtctcagtgctccgtaaatacttgttcctagattctggtagataaattgtactaactgtggatgccctttctaattaaactccttcctcctcaatgaaagcacctgacaacattgatgacctgggtcaaaaaaagaaaatgtgctgctttgcactccttttctgagctgccctccaggttctctttgaatccacacaaacttcagccgctgggtgggcctggctcccctccacccaaccctggagccattatggataacagagcttgctccaggtaagcgtcctgttgaggtcacttgactctgcagcatcatagagtagaagaaaaagtgtccagaatcctctccagaagacacaggagcccaaggaaccagactgagatgcaggatttgggaaccatcttggtagagagcttcctcctaaattggtgagaaaactttcggccatcaggggcgatctaagtcaacttcctgaactccccaaattttacccagttacacccatcttctcctggtgggtgtggctcccaggatccaggcttggacaggtgtccacagcaggacagagaccaaaatcagggcaggacaatgttgatgacagcatctggggagacaaagagacaagggccaacaggacggaagactggagctccattggagggagtgagcaactgcagagatcccaggagactggggagaagcagaaccattagggtttagcaagggttaaagagaaaggaggcagggcccaagaacttccccgaggtgtaagagcatgtgtaccttcagatctgtgtgcggcggaggacagagagtgtgtcagaggtacccaacagccacaaagtttcccagaaatgaggtccctgggttattggcagaaaacctccaccagttattttttttttttttttggcttagttttatctgctttgtccctggtgaatccatgcacctagaacacaatatatactgagcatctactttacgatcggcattgttctccatgccacagtttaagccaggaccaaagtagacagaggttcacaccctcgccaagtttccagacaaatgcatacatcctgagctggatacgtctgagggctacaaagacgggtgcagtgagcagatgaagagggaccagctgtggggggaggcagagctgggtagatttaaggatgagggagaaggaaccctttgaggagatgatattaaaggagaaacctgaagcaagtgaaggggccagccaggagggaacattggactgtgtattctgagtggagggaagaggaaactcaaatgcccacatgggggtcctacctgtgtggatgccaaccagcagccaagggtgccaggaagcaggtagggcagaagcaggagacacagcaaggctgaaggctccagggccttgctctcagctgccaggattctaatcctgactccacacgaggagggagccactgggggattctgagttcaagggtgacaagacttgacttcccctttaggaggagtcctccggcagccgtggaacacaagagacaagggtggatgtcaggagacccattagaagactcaagcgacactccagaggaagaggaggctgttgcaggagcagggaacatggaaaaagtggccagttggatacataacccaatatatttctggattgaatatcagtgtgagagaaagaaaaacctctagcttttaattttttgtggaagttttatgcagataaatgaacatacctacctccagatacaggacatcattttaacatgaattacaaatatgctcagtggtcatataatctcaaattaattcatatgtggataacagtaacagaatagaggcaaatgctgtcgtaattaagaactaggacttgagtgttccgtgaccctcagtttgaaatgtgggattatcacttactaaccagggaattgggggaatgggttaagaacactatgcctcagtttcttccgttgtaacacaggcataaaactagctgctctgtaagattgtttgattttatgagtttccttatgaaaaacacttagggcatagtaaagagtatggtagacaatcatagctcagtaaagagtattatagacaattatcatcatcatcactgtcatcattatcatcattatttaatttttctccagggaaaacatattgcatgtttagatttatccacagagaaaatgattgtccttgaagtaacaggactgaaggtcccttgatccctcccagttccctggcactgctgatattaatgactttgctgacatcactaggacaataaatttgggcactaatccttatggggaagagaatccatttccatggtggctgtacatccaagaggaaaggttcatagttccacatttccgttaattatagctctgaataatttaggtgttagaaatccactcataccattagcttttatggtggatttttatttttcttcttcctggtccccatttcaattaagaaatttcaagttttataagggatcaatggatgggcaccacatcattaatttaatgagaaagtttatatgagtgttcaattcctcggtcaattctctttcccttaatttgtaaaattttcaggaaaaaactaaaattccaatagagatagaacatttaaagatataaagaataaaactgcatgaaatacacacacactcacacacacaaacacacacagacacgagtgaatacaaatgaaacctgaatctgtggcaatctgaataagattagcggggtgtatctatattgataccctggttgtgatcttgtgctagttatgcaagatgttaccactggaggaacctcggaggagggttcataggatatgtctgcattattttttacaactacatatgaatacatttaatatatatcttttacataaatatgtgtgtgtgtgtatatatgtacatgtatatacacacacacacatatatttatgtagaagagtgcactttttggcaaaacgtcaactcctcaataagatagaactaataatagctctaaaaatttgtagacaatgcaggcattcttttctcaagttaaactcagtgaccacacattctacgaattgtccttccactctcctctgtaagtatttagttctcctgttttccttgctaacctggtgctttatacacgtttctgctctctgtgaaaggcatcactgttcttcctacaagccagaaacccaaaacccatcccgattccctccctccctcactcgccattgcaaatccagagtgaatccataatcaccttgcctcccacgcctgcctatgtgcatccacttctgcctctctctccagcagcgtccaggcacctgaccatcatctctcacgtgggcagctgtgggaacccccttcacatcgattgactctccatcttctctccaccctcccagtgctggtctcctctcagcagccaggatgacctttaaaaaatacgaatctgagcacatccctctatggcttcccctcttcccctactcttcagaacagaatcttcccccaaaccctaccaggtcagtcagctaggttgccgtcctttcacaccccaagcactccagcgctccccaggacttcatttccctctgctgttcccactgcctggatgtcctcagcccccagcaccccagcccacttccttgagtcagtctctaatcttcccccacatctccaaatggacatcctttgctaggaaccgggaggaactgatccctctgctgcaggtgtcacagagcatatcccttctcttcacaacatggcaagtgcacactcttctgggtaacgactgttttaattgaggggtaatttacatgctttaacgtgtgcagatctcaagtattcagttcaatacgtttgacaactgtctacactcataaagccaccatcccaaacaagccatagactactcccatcacccaggaacttccctcatatcttttagagggaaacctcacccttagaagcaactactattctgatttgtttcaccacagatcagcttcatctattcttaaatttcatagtaacagactcacacagcatccattctcttgtctccagcttcttccatgttgctgcatgcatcagtaagtagattttttttttttgagatggagtctcactctgtcacccaggctagagtgcagtggcacaatcccgactcactgcaacctccgcctctcaggttcaagcgattctcccgcctcagcctcccgagtagctgggattacaggcacccaccaccacacccggctaatttttgtatttttagtagagacagggtttctccatgttggccatgctgatctcgaacccctgacctcaggtgatctgcccacctccgcctcccaaagtgctaggattataggtgtgagccaccatgccctgccattaagtagattcttgatattgtgagtactacacagaatccatgccttaattctccaactgaggagcatccagtcatttctagctcttgtctattacaaataaggcagctatggaaattgttgtagaagtcattgtatgggcatatgttttcattcttcttggataaatacctgaaagtggaattgctgggtcataaggtaaatgtaactttaacttgacaagaaactctcctgggattctttaaaaggctgtacgagtttgcacttccttgtaccagccacgtatgagacttccattcactccacatccactccaacaattcgtcttgtcggtctttttacattaacctattgcccaaaacctggtggcttaaaacaaccctgcatttcaggaggggctgactggggtggttcatctttgatccacagagtgtcagtacagacttcctcactcccacgcctggggcttgggggctccttggcaccctttctcctctctctctctatagcacctcatcctctaatgtgaatgtgaaatggtatctcattgtgtgtttgggtttttttgagacagggtcttgctctgtagcccaggctcgtgtgtagtggtgtgattagaactcactgcagcctcaacctcttaggctcaagtgatcctcccacctcagcctcctgagtggctgggactacaggcaaatgccaccatgcttggttaatttttttattattattattttttatagagacagggtcttactatgttgcgcagactagtctcaaactcctgagcttaagtgatctgccagcctcagcttcccaaagttctgggattacaggcatgagccaccgctccaaggccctcattgtgattttaatttacattttcctaatgactaatgagcacctttttctgtgcttattaaccatttatttagcttcttccatgaagtgtctgttaaagtgttttgcctgtttctatggggttgtttttcacttcattgttgatttgtaagagtcctttgtgtagtctgaacaggagtcctttgtgagacatatgcactgaatgtttcctccctgtttgtgatttgcctatttgttctcttaacaggaccacttaataagcaatttttttcattttatcaaatgaaaaaattcaactttatcttttatggccaatgctttttgtgttctatttaaaagactctttgcctactcgatggcctaaagatattctccaatattttcttttaggatgatgctatccagcatggtagccactaccacatgtgactgagccctattgcccaaaacctagtggcttaaaacaaccctcgcatttcaggaggggatgactggggtggttcatctttgatccacagagtgtcagtacagacttcctcactcccatgcctggggtttgggggctccttggcaccccttctcctctctctctctatagcacctcgtcctataatgtctttccatatggcatgggcttctcacagtatggtggccttggagtacttggacgtttcacatggtgcctgatccctagaaagaatgtgtctcttatgacctagatttagtagtcctaggatgtcatttccacctcattttattggtaaagcaaatcactacgaccagcccagattcaggaggttaagagcaatagacttcatctctcaatcgggtaattcacagacatatagggaggaacgacactgataaaatgttagaacaggctaccacattgaccttgtattctgggttcttgttaaattcattttttatttctagcagttgtttttgtagactccatactgtttttgatgtacacacctgtgtcagctgctaatagcaacacttgtactcctttgttttctctctgtgtgcccagtatgcctctttcctgcctcattgcactggttgagacatttggtacaatgttggatgaaagtggtaagaaggcacactggatttgtccctgatcttagaggggaagtgtccagtgtttcatcatttgtgtgactgtctgattagcaattgactccagtcaactgaaagccaagattataaggaggatgcccatgggctcatctttatttcgccagggcttggctcaatgccaagcacatatgaggcactcaaaacatatttgttgaataaataatcttgacatgaatttagtctaatccagaatgcaacttgtgatggttaatttcatgtgttgacttgaccaggccacggggtgcccagataattgattgcacactattttggggtatgtctgtgagtgtgtgcagaggaagtttgcatttgaatcagcagagtgagtaaagtagattaccctcctcagtaagggtgagcgtcctgcaagctactgaaggtctgagtggaacaaagaagcagaagaagggagaattcgcccactctgcctggctgcttagccaggacattagtcttcttctcctgctcttgggctgggatttccagcattagtgctcctggttctcaggtctctggattccgactagaacttacatcgcatttctccaggcctccagttcttgggatttcccagcctccataatcatgtgagtcaattcctcataataaatctcttcatatttataaacagtccgccacttaccatggttcaacttcagatttttcaattttacaatggtgtgaaagtgacagacattcagtagaaaccatactttgagtacctatacaaaccttctgtttttttactttcagtattcaataaattacatgagatattagacactttattataaagtaggctgtgtgttagatggttttgccaagctgtaggctaatctaaatattccaagcatgtttaaggtgggctaagccaagttatgatattcggtagattaggtatattaaatgcattttggacttacaatatttccaacttaaatgagtttattgggatacaacttcactgtaaatctaggagcttatatttataaaacatatacatctacatttttatatcttctattggctctgtttctcttcagaacctttactaatacactagtcaagttagttatttaactctcagcttaagattttggagtttttaaaatctgtaaactagggattttgatagcctctgctcccatatcactaatatgagaaaagaaaaacacacatactccgaatgttttggttttttttttccacttgaaaagagacatctaagcatttgtttcaatgctatgacctactgctgaggagtacaaatgctcaaccatttctactatgtctaaatatcagccacaaagtggtttcttctactgtgaaaataaatgtctctgcacctgctgctgagctggagacagatgctcatctccataggcaggcatcacaggaaaccagaatttttcatctgcctagggctctcacccagttcgcttgagcccaggagccaaaccaaatgagattttggaggatgatggagtgttgtccctttcccaccatgtttttttttttttttttttttttttttttttttttttttttttttttttgctctgatacactgaagattgactatgtaaaaatgaaagctaggttacggcccctgagagccccgtcaagtgggcacaggacacttttgggctcttctcggtgggctcagggggagcacagctgtggaatgtgagattaggagcctgaattcttgctttgacacttcacatttgggtgaccttgggaaagcaaattaacctctctgagcctcagtttcctcatcttaaaatgaagacattaattctaacttccatggatttttgtagggactcaatggcgttacctttgtaagaagcaaaacaagaacttatcatgtatcacacatagcaggtacttaatggtgatttttgctattactgtcattatgattagtattagtattattaattactaaatagatccagaatttcacctattagggttaaatttttgtccttccccctctgtatgtctgttctcacactgctataaagaactacctgagactgggtaatttatgaagaaaagtggtttaattgactcacagttccaccagctgtacaggaagcatggctggaaggcctcaggaaacttacaattatggcagaagacaaagggaaagcaagtatgtcttaccatggtggagcaggaaagagagagcaaataatcgctacatgctttcaaccaactagctcttttgagaactctatcaccagaacagtaagggggaagtctgctcccatgattcaatcacctcccaccaagcccctccccaacacatggagattacaatttgacatgagatttgggtggggacacagagccaaaccatatcaccttccaacatctctttgattaggagatactgacggtctctgctttgagatatgttagcactgctgcccttactttgcagttggatacctctgtgagttgttcgagatgtttcacatacgttgtctcatttgcctttaacagtttccatgctcggcaggacaggtggcaaactaattcattgagagagaagacgttttcaaatttgctgggctgaagggccaggaagtggtagccgaagtccagagcttttggttcctccttctctcctattagcctagcaggaaagtctcattaatgaacttccttcccatttgcacctgagtttctttcctgctgctatttaaatgaaaatttttgccttctccagagacactgccttcctattgtaaaatataggatcaatgaatgaagaatacacacaaaaacccaaatgtattttaatttacaagcagtccgtgatcaaggcaaaagcttttcctctgagagccaactgggactgaactagaggctcaacaaagcagcagaacatgttcatgagcctcctctgctctcagggctttgtaaccgctgccctaggagtacttggggtgggatgattctctctgtgggcgttgcaggatgcttagcattctctgctgtcacctgcctccagcctgggcatagcattagcatctctgagccgccctggagccaattccaaatgcctttacatggagcaagaaccacccccggtaagaaccactggacaataattctctttgacaaatgatagtcctcatgttgacaataccatctttttccatcttggcttttgttttctgaggcaatgactgactcattagtataggtgtgctctgaaaacagagccagccagctttcaaatcacaggctgaagccatttccttgcacttaaaacactcgggcaccagctgcattctccaggaagaacattctgtctgacgtgctttctcgccagcctttgaaaatcaagcaagtgcaagttctatcaagggcttagcagccaggggttaatcgtttccttacaaatattaggtggcagtgtaggtctggcagcacctccctagaatgtgcctattcacaccaatgcctcccatgtgtgaacatgcgctcaccaactggcggaacctttaaagcagatccccagaggccccgtgagcagtgttctctctactagaagtgtccttgcaagggagagaagtgaagtcttccaaagaagggattgctcaggagaccggcaacatgtagccacagtagaaagctagcatccaaaactgggtttctctgcagcctcagccatcacttcccagctctgtgcaggctggctgtcctgccctcatggtggcttcaaaatgctagatgtcccaaagcctcttctgggccagcccagcaggaatgcaaaaatcccctgctggcagaatcatttttatgagaaattagtgatgtgtgtcttcgaagagctatgttccttatcagagggataaccttgaatggcacctgccttttaaatactttacaattccagcagtcccctagtcagaaccccacagcctttatcaccaacctctctgcccacaggttgcaggcagacgctgcccctcaaagatgtgttgtaagaaaaatatcagtggaaggaaattgcttattggccactcgacagctgcaaagacagctcacttggtctgatcgcatgtcagcccaaatttcttttatgtcataagttatttataccccagcctgcggtcttgagggtggtcacttgtactttgtgagaacatgaggctttggagaaagcagaaaagtcgcctcctgaatctggcatctgcttggcagggttcaatcaaaccaccttggagccaggttcgccaggctaagcaacttaaaatgccagtgcccagttaagtctgagtttcaggagaatggcaaagacttccccagtgataatatgtctcagttgcaaccctacatggcccaaggacctcatggcaaactcacagagtccttcaaaactattcctggctcactagcccccagcttttccactgaagagggaggagacttattccctccttgtgtttaaggttatgtgtactatataggcaacacctaaacagtaatcatcataagacacccatgagcacccacccatcataaggaagtgagcgttgttggaaactccctgtgtgcccttccctcttccaagcctcctcccagaaggaaccactagtctaaaatgtatattttttcgttatcttctttgactttttcattttactatgtctagatgggctcctcaatgtttatggagcatcatgtgttatgaaatttctatttcaaaaaaccatactgtccgtctcttctataactgactcattgcattcaccggtctcctccaatcaggcgtccgtgctgctgggtgcagctgtggtccattcatttatactgtggaccccacagtgcatccattaatcttgctgctgaatatttgggtcatccctgtatcttgctattacaagcagtgtggttatccacgtgggtgcctgtcttctgctgcacacaagcatggtgtgctctaagcattcccctgggaagggatcactgagtcacaggtaggtgcttctactttaccaagcactgcaaagctgttttcaaaggggttgctccagtttccattcccaccaggattgcttgagagaaccacttgctgcaaagcctggacaaaataatcagtcactgatcactgtcagctggggacaagggtgagaaagagtattttactgcagtcttgctttgcatttttttaattcagttttcagtaacggatacttttctaggcatttttccatggtttaggatttcaagaaagataaaatttacaaaaaaaccactttgttctatgaaaagaccttaagattgacagagaaaatataatgattaacaatattaaaaatcaaacagaagaaagaactagaaatataaattgatgggttaataagaaaatagtacaattaccccacgccaatacagctgagccccaaaggtacctaatagtgaatttagtgttgggactctcagggctcctcttccccggaacttccctccgtccagcgccaagaccaggacgagcaactccacggcacctcctttggtgaagtgagtcaaatgagttttgttgttgttgttttgagacagtctcactctgtcgcccagcctggagtgcagtggtgcgctcaatctcaggtcactgcagcctctgcctctcgtgttcaagcgattctcatgcctcagcctcccaagtagctgggattactggggcatgccaccacgcctggctaatttttgtatttttagcagagatggggtttcaccatgttggcaaggctggtcttgaacttctggcctcaaatgatccgcctgcctcagcctcccgaagtactgagattacaggtgtgagccaccacacctggcctggtgacatgagtctttattcatctagtttcctcgctgaggatgctgtccgccggggtcctgactttaggccagcatttcctcatttatatctccgtttttctgggcccaagagtagcccacgtttcctccttcagggacccctcccatcctggctctagagagtagcgctagctcacttacctcttaggattaacttactctcataatttctgacgtctaagaatttccctcattttcccaccaataccactacatgctgatgactttttggggggacatagaagttttctttgatttttggtaactcctttttcatgctagcaaaagcttttcatcattcaaaaaacatgaaatgcagaacctagaatagctaaaacaatctcgaaaaagaggattaaaatgggaggaatcgtgctacccaatgttaagacttattataaagccatagcaattaagacggtgtggttctggaggagcgatagacatagatcaatggaacagaatagagaagttagaaacagatccacccaaatatgcccgaggggttttgaaaaaggtacaaaaattattcaatggaggaaggacagcctttttaacaaatggtgctagggcgattgattccgtatgcaaaagtgagccttaacctaaacctcataccttatacaaaaatcaactcaaaatggaccattaacttaaaaacatcaaactctaagacttttagaaaagaaaaaaaaaggagaaaatctttaggacctatgctcagtggaaaatttttagacttgacaccaagagcaacactcagaaaatgataaattggacctcaacaaaacgtaaaacttttgctttcaggaagaccctgttaagaggatgaaaagacaagctatagactgggaggaaatgtttgcaaaccatatatctaacaaaggactcgaatctagaatatacaaataactcaaagctcaagcataaaacaaaaaatctgttagaaaatagccaaaaggcataaagggacatttcactgagggggatattcagatggccagtgagcatcggaaacaacgttcagcatcattagccattcgggaaccacaaaggcaaaccaccaggcattactacatatgtatcagaaaggctaagtttttttaaatgtaataacatcaaatgttgttgaggatgtggaaaagctgaatcacttatacatagccggtgggaatgtcaaatagcacaaccactacagaaaacagtttgtcatttcctacaacagtaaacacttaccccaggacacaacagattcactctcaggcgtttatcccagagaaatgaaaacaacatttacccaaatatccacccacacatttccaaagcagctttaaagtcataatggtcccaaactgaaaataacccaaataccctttgatgcgtaaatgactaaacaaactgtgagtacctggatgcaggctgtggaatactacacagcaatgaaaaggagaatgtttcaaatatgggcaatgactgggaaagaattcagctgagtgaaaaatgtcaatccgaaaaggttccatactgtatgattctatacatatgtacagcattctggaagtgacaaaatgagagatgcagaacaggttagtggttactcaggattatggaagagggagggagatggatgtggccctaaaagagcagcaaagagatccttgtgggactgtcctgtgtcttgaccatgtgtggtcaaaggaacctacacatatgataaaactccatagaagtaacacatgcatgcacatacacatgcacacacatgcatacatacatgcacacatgcacacacatgcacacatgcatacatactcatgcacacatagatgcacacacgtgcacacatacccacacatgtacacacgcacaatcacgtgcacacacacgcatacatgtacatgtacacacacgcacacacatgcacacacatgcatgcaaacgcacacaagtacacacatgtgcaggcacacccacgcacccacgcacacccatgcacccacgcacacacacatgcaaacaagcacgtgcacacacatgcatgcacacacacgcacacacatgtatgcgtgcacgcacacgagtgcatgaaaacctggcaacatctgaatcctggtgtgatattgtactataattttgcaagatgttacctttgaggaaattgggtgttgggcacatgggatctctctgcaatatttcctagaactgcatgtgaatctgtaattacctcaaaactgaaagtgaaaagacaagcatgaaatgtgaccccgaagattatcattattaacatcttgtgtgcttctcctcgtctctcagatagatgagtacttttagttaagcaaaagtgagttgcaaatactattttggaaccatggagtcagggtgcccctcacacacccaatccactttgttggacccacaagttgttttctctttatctccattgtaagcagcactgtgatgaaaacacttgtagatccatctcccaacacaacagtgatgcctcccttcaggcgaagagactggcttattttcaacactgtgtttgttcttaatgaggagtgtcttctagagaagcaaagtttaaaattaaaaagacagctgggcacggtggttcctgcctgtaatcctagcactttgggaggccgaggtaggtggatcacctgaggtcaggagttcaagacctgcctagccaacatggtgaaacacgtctctattaaaaatacaaaaattagtcgggcatagtggtggccacctgcaatcctagctactcggaaggctgaggcaggaaaatcgcttgaacccggtgggtggaggttgccgtgagccgagattgcaccactgcactccagcctgggcgacagacaaagactctgtctcaaaaaaaaattaaattaaaaagacacatggtggcatgtggaggaatggctggctctgtgcggtgtctaggcagctcctctttagatggaaggcaggtgcctttttgttgtgtgtgttttgcaaagactcacaggccagttttatggctacgctccttgacttgagtctgctctgatggacagaccacagatgggttccccctttgtccaatttccagtgtctatttggaggctccagagaacgatacaccggggaaaaacatgacataaaattagcatgagcttatagttcctctaaaaacaaaatacagattccttctctgtacatccaggcacaaggagcagggaagccaccatgacgtcccttctcatcctaactcaggggcacaatggccaacactgcaatgcaagacgatcatgcccaggccacgccgtccttccccaggttccatggaaaatctttggtttaaatgtccaggggagaaaggagaaagagaggaaggatgagaggaatgaaaggaagctgccctttcgaacctcacagtcatcttacaatggttttcaaaaatatacaatttttaatcattttaaactgctttattcatttgtacaatcttttgtcagacgatatcaaagtcaactcattttttaataaaactaaaattcaacatttttgcatgcaactgatgacccaattctcagatctgtctggggcatggtagacaaggaatctgggtctaaattattagaaacacacacacaccagaaaatcccttctgctatcagacttagaccctagatccatgtattactctttaaccttagcttgattggtctcaattctcaaaacaatgctctgaggctctattagcatccccatttatagacagggaaacaggcagacaaataacttggacaaaaggccagtcggggcaaaacagtttgctcagaggagcatggacacccagcttctctccttctcagagactgcttttgaggaatcgcctatgcagctctgggtcccctggagttagtccaggcagtgggaagtcaggaaggagatttaaggcaacaagatctgggactctcctagcagcatggaagagtctgtcttttaacagaatggtggtttgatgaatgcttttttgattctcatatcagaccaaattttaagagcccgtggccaaaatccacacaaagatcccacttcgtgtgattccctgagaccagcaaagatgccagctgaaagcccacgtggcagacccaggaatccagggaatctgcattccagggtcagcagtcaaggcccacaagagggaaggttaaaacccagggctttgaaaattcatcggacaggtcctcctgttgttgcatattgggccacaaggtaggtgggtgatgagcagtgacgaagggctgtgaagacgacgtaaccgatggccactgccaagcggcaaggcccgatttctgtttggcaccgctctctgcattccttaccattccccatgacctaggcacaggccccagtctgccttcaccatggggacacctcaggacgtgccaggtttccatctctaaagtgggaaatttcacaggcacattccatagaatttcatgtcctctgcccctgtgatgtcaaattcacccatgttttacctatatgttgttcctggctttgttaaaaattcaaagaaaatatcccataatacagggacacctgttctcagaggttgctgtgttattcactggtcaacactacaccatttcccttctttctttctttctttctttctttctttctttctttctttctttctttctttccttctttctttctttcattcttttctttctttctttttcttttcctctccgtttctgttttttaaaaaatttaactttgtgctattcatactcctctcatctccccgccaaatctcataacaaggaatttcagaagcatttcacccttttatctgcacttaagggcttttgatctattaccttggaggggttatttatctgccactgtagcctcctcgcaggaaaagtggtccaaggaggctgacctagaactgcttgcagcttcttcaaggagcccctgctagcacaccccacccccagatcaatttgcaatttatttgcactctgaggctaaatgctatttcaaagatatgtcagcttccaccccagggtggttcatcatcttctggaaatctgggtgcctctcgtccctggctttgattttgccattgcgtgaggtgcaatcctttccctcatggaggccagggtcaccctctgcctccagaggacaacaatgagaatgacgcagtggcctcaatgttgctggggactgtgctaaatacagacatctgggctccgtccccagtaaagtcccacagctccagcaagtatgggtggggccttgtcaaccagctcccgggtctgatggaggtggtcagttggtcactgaatctctgagtagctctggtctaagccactctgacaggcactcgtctggtctattttatgtcactaataaaactatttttcacctgccacttactgaattgtcactggtaaacattcactgtgcacctgttgggatcaagccctgcagcatgaaaaagttatcatcaaaggccacggaggctgctccagccctggagacagtcgtgcagacatcacacatatcaacaaacctttccttgtgtggggtcagaccatgagctcagtggccagccacacaggtttaaatcctgatgcctccccttgccagctgtgaaatactttgacaggtgaggtagcctccccgagcctcagtttgtccatctgtggaatgtgcattatgacacagcacacggggtcactgtaatgaagatgagacgggaattgcagggcacttggcagagctgttggcatcagtcagtgtgatgttgtcaaagctttgcagcatagatggggctacaaaatcaagactttcaaaatcacagggctcttcctgagagcccgctgaaggcgttacaggcactggtactggtatttacccacggaaggagcccttcaccagccagaaggcagaggcttggtgcccctaaacgctggggccccttgcaggctcctagttcgaagctgtgatgtttgaggggactttgcagcctagagccagcagcagcttctgacaaggaaggggcacattgagcttcctccgtggaaaatcgcaggaacccccacccacgcagccactcgcagaagcccccacccacacggccactcgcaggagcccccaccctcacaaccacttgcagggagccccccgcccacacggccactcgcaggagccccccacccacgcggccactcgcaggagcccccacccacgcagccactcgcaggagcccgcctcccacacggccactggcaggagcctccgcccacgcggccactcgcagggagccccccacccacgcggccactcgcaggagcccccacccacgcggccactcgcaggagccccccacccacgcggccactcgcaggagcacgcggccactcgcaggagcccgcctcccacacggccactggcaggagcccccgcccacgcggccactcgcagggagccccccacccacgtggccactcgcaggagcccccgcccacgcggccactcgcagggagccccccacccacacggccactcgcagggagccccccacccacacggccactcgcagggagcccccacccacgcagccacagcaccttgtcggaactgatcggagctgggtgataaggtgtggatcagtgaaacatctctggtgtttttccccatttcaaatgatctgatcttcccaatgagtcaaatctgaggagcagccttttagaaagaagactaggaactcagaaatcacaggaggcaacaacgtcctttgaagagcaaagataagccacccctttcctgccccgacccagctacagggacacgcagaccccacggcgagagggcctagaggaggctggcagcccaggctgctctgcaaaaggagagtgtggcagcacagagacctgcccgcagaggcgacggtgaggacacaggctcatgagaggccagaggactcctgactggacccaggaagagtcggggggagtcccacctagacaggagggagtgcagttagagcccaggctggcacgaagacagtcacatcctgccccattatttgcaaacctggtaccttcctgagtcactccagtagtgaccacaaaccgggcagagcttagaataatgaagtccaaactcaaggtgccagccaggccacctccctccgccacagggacatgcaggccctcggggaggctcctctttgcctctcagagcctccgttggctgctgccagtccctggcgtccacagcttgtgtggctgcatccgcccaggctctgcctccgtcttcccttctaaggacacagtcattggatttggggtccacatggatcatccccgaagatttcacctcgagatccctaattacatctataaagaccttttttccaaataaagtctgttaaaataaaaacgtcagccgaattacatttaaaggagtttaatggagcaatgaacattcgtgaatcaggcagcccccagaatctcagcagattcagggagactccaggggtgcctcgtggtcagaacaaatttatagacagaaaagggaaatgatgtacagtaatcagcactgaggtacagaaacacttggacgggttacaggttggtgtttgcctggaacacagttcaacactcagcagtctatgagaggttgaagtatggctgctgggactggccaagattcagccactgttaccggtgcctactcctaagttagggcttccaactcctctacccattaagtgaggctgcactcaaatatagaagtacagagtccttctcaggccatatttagtttgctttaaaaattcacttccacaggctctggatgaacttacaatttggggggtgggtggtggccaccattcaacctactgcagggggctcctttaccatgctcagcctcggtttctacatttcaaaagtaagagtaataacagtaccctcctcaaggagtcgaatgagtttcatgagcaaggctatgtgtaaataaagccccagaacattctgccttacctgggagcttgttaggaacgcagcccctcagctggccccagacaatagactcagaaggtgcattttcataaaatctcggatgatttctgtgcacacccaggtgtgagggtccctgccttctaacaacacgccaggtacctaggcaacactcaggcacatccgcagctactgcccacatggcagttccaggagggattccagaatcacaacctcaagcgtctcgacttctccgtgaagctcacaggcatgggtttttcacactatgacttccatttatttttgcggtaacaagcgcagctacttttttttttttttttttttttttttttttttttttttgcacatagcttgtttttagttcttagggctggatatttgtatgttgggttttttttattttaatttttaagttctggagtacatgtgcaggacgtgcgggtttgttacataggcaaacatgtgccatggcactttgctacacctatcaacccatcccctaggtattatgcctcacatgcattagctatttatcctgatgctctccctccccgttcccccacaacaggcctcagtgtgcattgttccactctctgtgtccatgtgttctcattgttcagctcccacttacgagtgagaacatatggcgtttggttttctgtttctctgttagttttctgaggataatggtttccagctccactcatgtccctacaaaggacatgatcttgttccttttcatggctgtgtagtattccatggtgtctatgtaccacattttctttatctagtctatcattgatgggcatttgcgttgttccatatcttttctattgtgaatagtgctgcaatgaacacactcggtgtggcgattcctcatagatctggaaccagaaataccatctgacccagcaatcccattactgggaatgatttatatacccaaaggaatataaatcattctattacacagatacatgtgcaactacttttgaaagttctcttttcaaaagagtttcttctgggttaccacttttatgagactaaaaaaagaaaaattatacttttttaaaattaaatactatccaaactaaaaatacattgttattaatggtgccattgcctggtgttatgtttctttccccaggggaattattttcagggaagaaaatcataattccctcaatgagccctgggtttgggtctgtgctgggcaggtgacacgccctgtgccacactgaagcacacccaaggagggttgcatccaacggctcagagcagacaggctcatagacctgtagactcagcgccaaccctctgtccagcctgcttcaataagtgccttaaaatcatctcttcaagacatgtaacccctcccgccaaccacttccatcattaaacattatactcaaaccttatgctctttaagtattttagctcctgttggaacgttttataccttcaataataaaaggctaaggtttttcactacctacaatatgcgtctcttgataaaaatttccagcctttatctcctcctcaaaggaacataatttaaatatgaataatgaaaaatacttccagaaacgtaaactcaataatgctttctgaggtgcaaactgcttaatgtgaaacttggatgcaacacaaaagaactgaatgttagcaaattatgcttcctgacttggcatgtaataaaattctcaatgggcctggcagctggtggcaggagggacgatggcagtgaggagagcatgactttttaggctatttgcgagggtgagtgcaggcaagatgttctggcaagcctttggaattaaaatggcaattctaaacaccttttcatcacatgctttaatattatacacattcttactcttttaaggagatgaattttcagagagaatcaatgtgttaaaaagccgaagtgtaaatttattcctttgctattaaaaagaacacatcttgcataaaagttatttatgggaaagtaaggaaattctaatttaagccaggcctttgaatgtcagctggcctctctctctctgctctctcttttcttctctctctctctttcctgcccccacccgcaaataataagcatatgatttaattctgcatagaactaagtagaatgttccttttgccagtgtcatggaatatctgtgattgaagcctttccgggtttatgacactttgggaggcgttgcccacagacagacctcagggggctcgtccgacacctcccagagtcaccatgacatccccagtctcctgtgtccattctcattttcacactaaaggcaaaggaagcttacatttgaccctagtaaatgcacctatcaaactgtgtttgtcattgtgtttttctgagttcaagcgaagagaagaaaacccgcctgcagaatttgagaaggaccatctgcggaggaggctgagcagaagcaccaagtgtgctggattcaccaaatcttcaagctccttcctgggttcctccccagctctttctatatcccttgctctatttaatcacattgtttatggtaacagttgcgagaaagaggatttgtttaacactaagtgtttcacaccttgggtaaaggagttcatgctccaattctatttcaggctttatttatgaatgtgcagctttccaagggtgcggggtgtgacagccagctgtgtgcctctttttaaaaaggcaagtctctcgttgacaagaaaggtttattgacacacattgaaggactgctttccttttgtattaagagtagcacaactagctgcgctcctagcaacacaaacattttctgcccgtagaaaatgtttgctgagaagatggatcaactataagacttaatgactgggtcaaaacagtttcaacaagtggggaaaggagtacaatctttctcactctgcaaaagaaagccacaatttttttttttttttgaaagatggcagcttggcccaccagttcaatcacctattaaagccactgtgcaggggacaggtccagggtgcaacggccttgtgcaattgcaaacccaggtgggcatgaaatgtaatcaagttaaagttcagccattgcaaggcctctctccaacaccgaaggtgttacaaagatgacaataatcttaggaaaagcagagacgttggaaagacaccttgttcttcagtttttgctgacatgacctcagtctaagccaacaggtataatcacaatactactgctcctgcggatgacccataggcccttccccagggttagaaaaatattctctccctccttcccactttccctccttctctctctctctctccctctctccccctctttctctctctctctccccctccctctctctccccctccctctctctccccctctctctctctccccctccctctctctccccctccctctctctccccctccctctctctccccctccctctctctccccctccctctctctctctccctccctctctctccccctccctctctctccctgtattaatccattctcacactgctataaagacatacctgagactgggtattataaagaaaagaggtttaattgactcacagttccacatgtctggtgaggcctcaggaaacttacggtcatggtggaaggggaagaggcatgtcctacatggtggcaggtaagagagagagcaagcaagaacaggaaaactgccttataaacccatcagacctcatgagaactcactcactatcataagaacagcatgggagaaactgcccccatgatccagtcacctcccaccaggtgcctccctggacacatttgagatgagatttaggtggggacacagagccaaaccatatcagtccctctctgtctcctttccttcttctctccctctctctctccttctctgtctcctatcttgcctttctctcctcctgtctcctactcttcctctcttcctctctctctcttccccccatttcttcctccctgctcaataatgtctctctaaccctttggctcccttggtttctctctcctttctttctctttctcatatctccttctcccttcctctcctctgccccctccatactcctctcaccttcataatctccttctctcccccatctctggccaccacacagcagcccatgaaactgcccacacttgcaaactgaatcagaagcaaacttgtcattgcactatttctacccccagctttgcacatgcccctgagaaggaggcacaatggcccagctaccttctcgggcctgttcatgccaatgttggcaggatgttgatgtccaactggacaaagacccctgaacacacagcagggagcaagttgcttcctcccttgttgctgtaagggaaaactcacactatggagaaccaggagggcccccaacacagaatgacgaagcacgtggggaaggatgggggcctagctggggcttcaggtctaaggaggtggatctgcattgggtgctgtcagaaaagggaccaattctgtgactgggggtctcaatcaatcatatctggggagggtgggccagagggaggatccagctgtgtgatacagcagcaacttccactggttcatggggtgtgggtggcacagtgagcttgcttgccatggacattcttcaatattgtttgtgtcatgttggatggggagcaacagagctcagctgtcagcagtggacagtttgtcctagcattggggtcagaccagttctgggacaacagcagctgctatgttttctttctagaatgtaagaaaggaaaattccaaaagctaaacacccactgacatcccacaaagatttccttccacaccaactccattaactgggttgcatgttgaagacaagtgactgtgccctcacatccccaccgcacttgttatgtggtggaattttttgagagcagaagaaagtagcctgttggtgaatgtgaaagggctctgaataacctggagtggagagcatgagggtctgcctgtgagcatcccagtcagctattcccactcagtagccacgggcaagaaacttaggtccctggtgcaggttggtcccctttgcagtgggcatgagaagtggtcacttcagtctctccactctgccccagtgcaccctgggcctttgtgtgtttaggcaaaactctccagccagagccttggaggctggcactgagctctagggttctctctagcatcctcgggtctctgttctctgcctttgcatctgtgcctttagcttgccagaggagttcctcccttttttcacagagatgactccagcctgtccatcctaaaggtatcacctcctgcaggatgctctctgtactccctggcccccacagcccctgtggtcagggggctgcgacgtgccagaggtcatcctgtctcttcccctctggctgatcctgggagagtaagctgtgtccctctcccctcagcagcagggctttccaagggagacaccacgtccttgggcttcaggaccctggccctggccctggccctggccctgaaggatgctgtcccacccatctctcccctcccttcccataccttacatttcaggaacccaaagataggctgtggaaaagcagaggcagatgagtgacagatgagcccggtaggaggcacggggaggcgttctgggctggctgcaccatggtggaggggtagcagccatattctgccaggaccactgcacctggattatagctcaggtcttctcttccaggccctcaacccatcaccccgtgtgtttttaactcagaaaccccccacagaggatcagggtcctctctgatattctaacggactccaccctcctcctagaagtgtcctcctcttctcatgggtctgcccatcacatgaccatctgaaccccaccccgcccccccagcacgcactacacatactcacacgagcctgggcatgggtgagcatgggccccaggcaggaccctggcataaggctgccacccccaagggagaaggaggccttggtctgagactgcagggaccagggaccacatagcttggagctgccctcacagaggtgggggcctgagcacaaggtaggagaggcagcagccagaagccatgaggtcagcccaggctgagccctctcaccagactgttctgtcgaaaatgccaatgtgtgccgtctttatgcttcgtgtttatttttactttgcattgtgtttctatcacttgaaaccaaaagccccaggcctcacacccttgagtgcaaccagagcatttggaaatccaggcaccattgagaattctggtcagagcatgaggagaagcttcctgcatggcttggtctcatccaggtagttccagcaactggatcacaggtttccaagagaggcagagacagagagagatttcagccagctccatgcagtctgagtggaggaaacttcctccaactcctaatcgataagtgcatattgaaagacaagagagatctatattcagtatgaatagcatcccagtggttctttcccaataggcctggactagccgactgcgtacagatcgagtccaggcatggagagaccatgcacagtggctcatgccagagtccactgttactcacttggacccagagggccatccgtcctgattcaatagcaaacactgtcctttgtctgaaagtcaggaaggagcccaggattccctgagtctctaaacagcaggcctgggaaattccaaaccaaggcctgtgcttatatgtttaattcaatgcatgttgtaacaatatataacaatatagaattactatggtaggaattgagtcagtcaattcgagttgatttttttaatcccctgctcacagcgagtacagtgcccaaggcgtttaatgaatatttaatgcattgaaggttcggaataacactttatagaaaaagttttagggtttaggataatatatggaaactgctatgttactctgttactttgtccacgtgataattaaaacacaaacgtacctgagacccatcattttaccttaaagtgatgagttttgagaatttacttatggcttttattttctatttcacatccatacactttgattttgatgcctctacaaagatgacttctttctgctttgggttttcatttccagctttaagtgcttttgttcctgactctacccactccatgttgtgtgcttttcagacatgactggctatgagacttgcttgttactgggtgaaaatgcactttctctggtccaccccagatgtataatgtcagggtctatagagatgggatccagtaatgtgcctgtctaccaaattcttcatccccgctctggggttccagcaagttctgtttgcacaaagaggcaatgatacgtaaagtaaactttttatccattgtagattcttaaacctatgggaatattacaaggggagattctcagtggaattttcaaatatagaatgaaatgtatttgcatttaaagtcacattcttacatattagttgagtgactattcaagtccaggccctgaatcaagtacagattttacatttagacctgtgatatgttaggttaattttgtggaaggtggaatgtctgtgtctagattagttttgagcatgtgcaagttaatttgttccagcttcatttcctgaagagactctccttcctccattgtatggtcttgtcttctttatttgtttgggtttatttctggcctctattgtgttctattgatctatttgtctattctattttcaacaccacgctttctggatgatgactctagctgtagagcaagtcttgaagtcaagcaatgttgtcctctgactttgctcttcttcaacattgtgttggctgttctgggtcttttgcttctccacataaattttagattcagtttgttgatttctacaaaagagcttgccaagattttgattgggtttgaattgattctatggatcaaagtgggaagcatggacacctatacaatactgagtcttccaatccaggaagacagaatatctctcaatgtatttcgatcttctttagttttatcaccgttctgtagttttccacaaatagtgcctgttcatattttgttatacctaagtattttattatttggtgctattttaaatagtaatttttaagtttcaaattccaattgttcattattggtatataggaaagcaatttacttttgtatattaacattatatcctgcaaccttgctatactagtctatcacatccaagagatttttgtacattctttggcattttctacataggcaactgtgtcatctacaaaggtagttttctttcttcacaacctgtatatttttattcccttttcttgtcttattgcattagttgggatcagtatgctgttgagtacaagtggtgagaggcaacatggttgccttattccttatttgaacaggaaagaattcagtttcccaccaatgagcatcatgtcagttgcagtttttttgttgacattctttatcaggtaaaggaagtccctctccattcctgctttgctgaggatttttatcatgaatggatgttgcattttgtcaagtacttcttctgcatctgttgatgtaattgcatgacttctattctttagcctgttaatgtgatgacttgtatgaactcattttcaaatgtgaaatgagccttgcatatttgggataaatcccatttggtcatagtgtgtaattatgtttatacattataggattcaatttgctaatattttcctgaggattattgcgtttaagttcataagagatgttggcctgtagtttttctttcttacaatgtcttcatctggtttgggcattaggataatgcgggccatataaaatgagttgggaagtgttctttctgcttctgggagaaattatggagaattggtatgattttgtcattaaatgtttagtagaattcatcagtaaaccaatcttggactaatgcttacagttttggaaggttattaattatctattcaaattattttataaatgtaggcccatttatattatcaaattatccttgtgtgagttttgacagtttgtatcttccaaggaattgaatggtcatttcatccaagttatcaaatttccaggcatagagttgtggtgatatttctataatccttttaatgtccatgagatcagtaatgatgcctcttctctcatttctgatgtaagtgatttgtgacttctctatatttatcttggttaacctggcaagatgactatccattttattaatcttttctaagaaacagctttgggttttgattttctctattagtttcctgttttaaatgttattgatatatgctttaatgtttattatttttctactgcttgctgtaggcttaagttgttcttgtttctctttttctgaagaagcagcttatattattgatgttttgtttattttctaatatatgcatttactgctacaaatttccctctaagcactgtcttctttgtatgtcacaaattgtgatgctatatttgtatacttctgtttaaaatgttttttttaatttaacttgagatgtattctttgacccacgtgttattttaaaatgtattatttcatctccaagtatttgggtgttttctgactgtctttctgatattgattcgtagtttaattccgttgtagtctaatgacacactttgtgtgatttctgacattttaaattggttagcgtttgttttatggctcataatgtggtctgtcttggtgaatggtccccactagcttgagaagaaggtgtagtctacagttattggatggagaatttcttaaatatcaattagatcaaattgattgatggtgctattcagttgaacttcagttaatccttaatgattttctgcctgtttaacctatcaattaccaataaagaggtgttgaaatctctaattataatagtagatttgtctatttcttcttgcagttctaccagcttcctgccctacctattttgaggctctcttgttaagtgtgtagacctttagggttgctatgtcttcttggaacatgggtctttttgtcattacacaataccaccctttatccctgataattttccttttttccttcttctgatgtctgctttgcctggaagtaacacagctatgccagttttcctttgagctttagcatgttatatctttcttaatcctttacttttaacctgtctgaatcattacatttaaagtaggtttcttacagaaaaaatatagttgggccttcatatttcttaatctattctgatagtctctgttctttaattggtgcatttagacaattcatatttaaaatgattattaatatatttgaattaatgtctaccacatttgcaactcttttctattctatacattcatcctttattctctccctatattttttggtctttgctggttttaactgagcatttaatatgatcacattacatctcctttcttagtatgtaattgtacttctttataatatttttaatgactaccctagtatttcaactgacatacatttttaactatctaagtccaccttaaaataacagtatactaggccgggcgcggtggttcacgcctgtaatcccagcactttgggaggccaaggtcagcggatcacaagctcaggagttcaagaccagcctggccaatatggtgaaaccccgtctatactaaaaatacaaaaaaaattaggtgggtgtggtggcactcacttgtagtcccagctactcggaaggctgaggcagaagaattccttaaacctgggaggcgaaggttgcagtgagccaagatcgtgccactgcactccagccagggtgacagagtgagactctgtctcaataaataaataaataaataaataaataaataaataaataacagtataccacctcacagtacaggtgccttataaccatgtattctcgatttcttcctcctatcttctctaacatcactgccattcctctcacttattcatatgctgtaatcacccaatacattgctactattattttattttaaaccaacaactatttttggatcaactaagaaaaagaaaattaaatttttttttaccttcattcattactgctctgatgctcctcatttctttatgtagatccaagtttctgacctacagcattgtccttctctctgaagattttcttataacatttcttgcagagaagatctgctggcaaaaaagcaaaaccctacttgttttgtttgtctgagaaagtctttatttcttcttcactttggatggataatttcactagatacaaaattctagatcggtgtggaatttttccccccaacactttaaatacttcaccctactctcgtcttccttgcatagtttctgatgaaatatgtattgtatttcttttcctttttcctctagtggtgttattatttcctctgattttctcaatattttcttgtctttggttttctgcagtttgtgtgtaatatgcctagatatgttttttaaaaaaatacttaacatgctcggtgttctctgagcttcctggaagtatgctttggtgcttatcactaattttggtaagtttccagacattattacatcaaatgtttctcatgctcctttttctttttactcttctggtttttcaacaaaatatatgttatatcttttggcatttccccgtagtttttgaatatcctgttctattttaaaattcttttcgcttcttgaatttcagtttggagagtttcaagctcactaatttttcttcagctattcccagcctattgtaagcccatcaaaggcattctttatttttgttattgtattttttatttctaacatttccatttaatttttcgtagagtttccatctttcttctgacatcacccatctgttttgcatgctgcgtactttttccatcagagcccttagcacattaatcacaggtgtgttacattccgtgtctgatcattctgagtcatagctcagtcttgttctggtgctgtcttaaggctttgtttggtttggttttcttgcttttttggcacatcttgtatttgttgttgatattgttgttgtaaggcagttatgttgtaagaggaaataaggaaataggcatttagtgtgagacagtgtgttaatctaggtagagtctgactgtgttttgtgcttgctgtagctgcaggtgccagaggcttcaaacttctctactgttcttgctttttgtctctcctcttttccttaggtctccctaagtcttcctactcagagaatgtctgcaccttgcaactctttcactgttttctgcaggaacctgtcagtggggtggggaaggagagtgtttcacaatattctgattaaatctgtcttgtaatgggcctgtgtctcagggctgtgacagtcacaagcttttctccagtagtataactacttttttccgtaggtgagtaatgagtatagtgggcttgacatgggaggaatgccatttcagcattaggacaatgtctaataaaataaaatgaagacaatgttttttctcttcagagtaggccttaattatgaggcactctctgggggtccttcacaagcattacattcccaccatggccatgagatcatttttggatcttcaccatgagaacatggtggggttcctgaaagtaaaactgaagaaaatttgggctccccagtaagaccatgcccccagaagtttctcaatttcatgttaattcacactgagtcccacaaggtcatcagaatctccatagaagttctcctgtcacattatggctccagtaacttctgctcagagtagttgatcttggctgattctctgtgctcacctcccaattttagggtggcagttttccctataacttcagttccttgacaaatccaaaaaagtcatgtatttctgtttgttttgctctttcttattgtaaggatgggagggatgacttccactctttacatgcagtctctgaaactggaagtcccttaactatgaatcaatgtataactatactgacatgtaactgacaggaacacatttatttgctcttcaagatacagaaactgcagatcagaggggttatatgacttacctgataccacagaggtggtaagtggtagcccagggccttgacttcagaccacaacactgcattgcaggaacaactatgaaatttgaagctcttgatgcaaaatgaaaatgtgaggtccttgttcaaattattaagaattccaatactgtgattaagcattaagcccatcgggggggcactttctgaatgtggaggcctgtgaggctgcatgggtcactctcccatgaagctggttctcctttaccctgtcccaggcacccgtttccccaggaaaccccgcgttgaggctgccatgtcagtgttgaaggggctttttctcttcttttcatcacaggagttaaccaagatttattgagtcatatctaagaacaagctctgatcattgtacctgccccttcataatctagaaaaatccttgcctataaatgcattctatatatttttagtccactgagttacatttcagagttttttggtatagaaaatattatacattttaagttaaggtaggaacagcttaattgacctcctggaaaaagtgtattgagaactcaaatatgatgttccttttttttttctttttttgagacgaagtctcactcttgtcccccaggctgaaatgcaatggcacgatctcagctcactgcaacctccgcctaccgggttcaagcgattttcctgcctcagcctcccaagtagctgggattacaggtgcccaccaccatacccagctaatttttgtatttttagtagagacggggtttcaccatgttggccaggctagtctcaaactcttgacctcaggtgatctgcccgccttggcctcccaaagtgctgggattataggtgtgagccaccgcgcctggcctatgatgctctttaaaaccatatttctaggtgaggcaggatttattttgcagattcacccaagtacattttcttatatgcaaacaaattttaactttgatgcaactatccagagcatcaggtctcctttgtgtttccataggcccttagctatgggtgtgttcccatacaccctaaaccagggcacagcaggaagctcagtgctcaactgatggccactctgacttgggtggtcgtgggtggtgctggggccacagagttttcctgaagtccccagatgatattaatgttagtgcagcctgagaaccattcacctcctatgtcctaggccagggagatcccaacactcatggccgtttcataggacatcttacacagggcagcttgctacacctgccgggcccacacgggcacgcacgcacatgcataggcaacacaccaacatacatgcacacgtgtgtctaaagcgtcactttaagcccttatggtagtaagcaccaacaacagtattgctattttgttttagggcatcgatcattcttgttttcctctttctcaggaaagtaaatcaccttttaaaaatgtcccatgactgtttctcagcgctgacagtctcaccacggtgctaacgatggctcagcgcacacgtcttgcttcctgagcagcgttttaccatcagcccatctctattagagggactccagggcacagagagggccagcaacctttccagggtcacagagcttgtaaatgacagagcagaggtccaatcctaggctcaagggcatactctgtcacacttaacgctctgtgtgacacacaggctgctggtatgcaaggccacttgtagctccatgctgcccgatgaagagccatcagttttctgagaacccagagccctcagtgaatccagcccccttgcctccacctgcagctccagcacacagacgtaaaccatgatgcctccatgtctgcaaggctcatgccggcctccccaggcagagacaggagcggactctctgcttggcctgcatacgcttttcaggtgacgtgcatgctttctcttagaaaaggtgaaagggaagggtcaggagatgcaggtcgggccagggtccctgtgtcccccactccctccatgcccaggaccctgtgatggctacagtgaaatttccagatgttttcagactctacctttgactttcgaggcctcacagggcaaacccccctctacccagtgtttctcaccagcatccccaactccgtgcagccccctcccctctgcagaagatacccccattcccctgagaggttctgagcccactgcctttccaggttgtgacagcatcgtctcagggacctgtgcctctgcagcacaggatggacggcacgacgcccaggtgagccacatccacaggctttggtttggagccatctgttaaaaacactgggattgaactgtgaggttgtttgtttaaacccattcaggaaagaggccaaatcagagttgatttatactccaacaataagagattgcattgggccagggcatttctaggtacataatcctccctgctcagccagctccaggtcaagaaagcaaacctggtgtctgaaaagagaaaatgtgcatgcggacccacagatggaggaggccatagcaacttcacgaacagacagagaaggccacagcaacttcgcgtacaaatggaggagtccacagcaacttcacatacagatacaggaggtcacagcctttgcctctgctaggcttcatccaattattatcccatccccagaagaacaagtcagtctccataactctgcactcagacgtccctcaaagcctacctcaataccaggtggggatgcagcttctacaccttctgaaaagaatcccatccgttctcaccattgccaagccaggctgctcctccaacagcagtggcaaatgggtgggacctgcaggagccgaaacacctgggaggcagccagttggcagccagaacccagggaagggcagctgccctccagagtggcacagcctcctgctggcatggtgagtgtcctgtcctgaaggtcaggatgcggggatgcagagaggtgagcagagtggaaatggtctgtggctgggcaagtgggctggtccatttgacactcatttattgcacatctagtgtcattgagcactgtgtgggggggttggagcctctctctgacactattctgtatgtgaccaaggacaggaaccccctacacacacacactcacacacacacacaaacacatatgcatcttacatcaattgcctgtagccaggcctctctccacatgttgatggtagaacatgaccatgattcatatagagcacagtgatgagctgaattgtatttccccaaattcatatgttgaagtcctaatccccagtccctcagaatgtgaatgtatttgaacataggtcctttaaagaggtaattaaggcaaaatgaagtctttggggtaggccctaatccaatgtctggtgtccttataagaagagaaaattaggacacagacacacacagagggaagacaattccaagacagggagaagatgccgtctacaagccaaggagagaggtctccaaagaaaccaaccctgatgacacctagatcttgaacgttcagcctccaaaactgagaaaataaatgtctgttgttgaaggcccccgatctgttgttctaggttgtggcagcccaagaaaatgaacgcaggctctcagcaaaggatctggtccggaatattcattctgcacatcatggcggttagtatggcttcataatcactgagtaaccactctggtcaatgatcaatcctctaccgtgattgattcattcgttttagtcattccataaatatttaccgagaacccagcaagtcccaagcagtgttctaggcaccagaatactcgccgccttgtctataactgtcaaacctctgacggcacggacagagcccctggactcactctgtccagcttcatggtgctgaaacggtttcttcttgacctgtcacggacgcccggctctccagtaccgcactaatcctgcacaaacagaagcagcccttcttgtttgagtttagtttccaggaataggtagtctccacaaatgctttctcgtgtctgaaaacaaaaacgatgtgtactgtagctgccaggaaacttggggcacatttgttccctaaacactgtcatctgttcagttcaggtgccgcctgcatccgctccttctgtctccctcccacggcttctgttcccttgtagttttccttgcattgggccctccattattctctcaagtccttttagaagtgcatgggaagtgtaaatcgtacatgaattgcaccctaggtcactggggctgtttcaggggtggaggtgaatgcccatctcataaagcaatgaaaacacagaggttttcaccaatcaccccggcatgagctgggagaagatgttaaccgccggtatgattcgtgcctgactcacataaactcactgcatccatcagtgcatttattcactgtacttgtgtgaattcagtccctttaacctaccagactttaacgtagattcaagaaatgcatcagaaacgcccactgccctcagggagcgggctgtgaactgaggaagaagccaattacagttggatgtggggagtgctgtgcctgggaagactgggggctgcagggccaggagccgcctgcattgctgggatcaaaaacacctgcaggagaccctgccataccccctgagactggagacacggagagcaggggactgtgaagggtcttgaactggattgtgaagccgtgcgagaggctggataacagagccgcacatgggaatttttgctccgcaagtcaacctcaaccctaaaacaaaaattacatttttgttttacatctggcaacaaagtagatgtttgttgggagattgaataccagatcaccccatgatgagaacatgacatttttcttccttgtggggtttcattgctgggtcagcctcaagactgacagagatgagatgcggtctttctccctggccgaggatccagagatggtgccaaaagcgaatttcctgctgggtccctgatatcagtgacgaggtccaggggccccgtggggctgctcttggtttctgtgtgaggctcccacactgatctgatcaaaagtgagctcctaaaaggcccatggagtgggatgggttgggagggcggtgagagcccagagccaccgaaggccccaggtagccagtggaaggacaacagggcccaggaacatgccctggggcaggtggaggccgtctcctgcaacctcacaggtgctgtcgtctgccctgaagtcccactgtgctcacttatatatgacatggcatcagggcacccctcctctggtcggagtggtccctgggctcagtcttggattctggaggtgtccagaagaagtgggaggcagccctgcccgagcagaggtggtcacggcaggtggaagctgacattgaacatggaaggcatgcccgggagccttgtgccagtctgcatggcagcatcagtggttaaaaacccactgtccactcccttcagcccttcagccctgcttcagcttctgggcctccctggccctctccaagttccagtagtcaaaatttagtccctggaggggctcctccagctcccgcccctgccctagtgcctgcagctattgactggccatgctcaacccactagtagacaattttaacgttacccctgccgtggctccctccaggattctttctgccatgctgttgagcagaagacatgtctttctctgacttcttctgccaccagccaaagaaaactctctgctcttaaaaatcttgcctgactaggtcaggtccagagaagaccagctcccttgggacataggatgtaacctgatctcagagtgatgtctcctcatcgttacaggttctgcccacactcaatggacttcacaacgaggatgtgtccaccagggggcagagatgttggggtcaactcagcatcttgcctaccttaggaggctggctatcttagggaggagggttgagagaggggagaagtaattctagggcagagccctgtgtttagcgggctgagcagaagagcgaccaagcaagcacaccaacaggctactcagttccttggttaggatcccagtgctcctcagtgagagcctgggactacagccacacactccgatgcccaggccagcagtccctgtataactctatctatccatccatatattcatccctccactcatcatctgtttacctttcatccactatccattgaccatccatccatccatccaccatccatcctccatccaaccactcaccatccatccactatccatccacctttcatccatccatccaaccatccatcctccatccatccatcaatccatcatccatccaccattcatccacccatccacccatccaccatccatctgccatccatcctccgtctattcatccatcatccattcctccactcatctgtctaccattcatccactatccatcaaccatctatccatccatccaccatccatccatccatcctttcaccatccatccatgcattcatccatttatccatctatccatatattcacccatccatacacacatctacccatccattcaccatgcttctatccattcacctaaccattcacacatctttccattcctccatccatccacacatccatccatccattcatctctccacccatcaatccattcattaatccatctatccatccatccatctgcccttccattcatcaagtagctgtgaacaatggccgtgtgccaggcactgtgatagtgaatgagacatgaaataggcctttccctttctgggttcacagtctagagcaggtgtaagaccttcccatgggccactgcatcaaacttttttaacctagacactgttaacatctgtagctggatagttctctgttggggggtgctgtcctgtgcattgtaggatgtttggcagcaccccagtttttattcactggataccagtagcacctcccagttttgacagccaaaaatgtctcctgatatgtccagacccttgggatcaaaatcacctccagtgaaaactactgcactttgtaactgtggttgggatgccttttctagtgagggaaacaacggttcttaggagcacctggggaaacatgcacatctgcaggtgtccacctcctggatctgctgcactggggtccccaggtatgtctccacaggtgaacacacctgtcatctgcaggtgtccacctcctggatctgctgcactggggtccccaggtgtgtctccacaggggaacacacctgtcatctgtaggtgtccacctcctggatctgctgcactggggtccccaggtgtgtctccacaggggaacacacctgtcatctgcaggtgtccacctcctggatctgctgcactggggtctccaggtatgtctccacaggtgaacacacctgtgtgacaatgctttaggaggtgaaggtgggaagaggagcagtttggtggctcctctgcatgggtggcacccatgcatccatgggtggggctttgtagagggcacagaaatggggccagcctagagcaaggtgaacacctgagaacaagcacagtgacccaggcaggggctgggatcaggaagaagcctgtttggtggagggctttctctggatttaacatggattagagactcaccactccagctccacacacacacaaaacaaaacgtatttaagattcttccacgtcacttccacccatggcaacttctgccatgtttgaattttctcagaaatatttgctcaaatcatccatgttaaagggcccaagttctaaaccaccacagtcaactactggctgcgccagagctttggcttttctccatctaccagctctgtctagctggtctattatcctttatcctagcatgagactaaaggaccacaagatgtggcaatgcaggttcttcaagatgttctatacgtgtcgtgcttctcatttcctctactccagaccagcgtcccctcaactagcctcctccacttttacttgtgcccattgacactgaactggctcacagctgctgccaaagcaaggagatatgtgtgcctcactgtatccacatggtctcttcagcaccaactgaccactccaatgccacaggagtggcacatcaggtgaaaggccgaaggcactcttgtcaaggcatctcaaaatcacctggtcctagttctgcttccttgattggcctgggcaagggtgatgtgtgacaacatggagccaaacatacaggatgcccttaggttgaatcaagggctccagctaccccagctgccccagctcccaggccagcagtaggacaggtgaccacacattcacacattttgagctgacactgggctcggagacctcctacaaggcgcttcagtctgccgcgtctcaggcttctcgtggtcaaggggataatactctgccttcaacccagagaaacagcatgaggattcagtgagatagtccaggaaaggggctgagaagccccagaaactcatagttgaccgtggtggtctactcacccactgtaggggatggttactcctcaataacccagcctctgtttcccttcaatctggtagcaacaccccaattgtttcaataagaaactaccccttatcttctctcagtctttgtggttaggacagggcagactccaagcatcctgtggcagggatgggaccttgagccaggtcccaagtaaaagagttttccctccctagaccacagcaaatggtgaagaaatgagcttgtgatcaaggcaggtctaaggagaggtggttccagggccactggtctgaggagccgccagccacctcacctgcaaggagaagagagcctgctcaagaacccagccacactgggaacagcccagatgatgggcccagagcaggagcctgactcacgggggcaacatggggtccctgcaccctgcagcccactgtgcctgaacctggagttccagtcatgtgagcaacactttccgttccgtctttgacacaagcacttctgagttagtttttaatttccaatttaagaacccatttttgtatttaaaactcttctagaactcccctgggcaggtctatagttttcagcaaccttaaggggagaaaggaatcactgccacctaaatttagtagctttgcagcataattagaaaccaaaatcccggccagtaattctgcatctcctatttggtggtggtggaggaagccatgttttagaaagcataagtggtggactttacaagttgcttttattttctgagatagaaataaacccaggagtagtgactcacctccctctagcctggctacaattttccacatccaattcaaatattgtctttaatttttaatttggatctgactgatgcaaactaagtgcatcatctctgccaccagctgggcaaagcatcctgttccctgtggtacaaccatcctgttccctgcagaatgtactgcaggaaaagcctcaaagatggatgtagggaacagtgagggcgggcattgcatctgcttttgacaaatgagtattaaatagaagaataaatggcactattgatgcatcctcttttatttatggagagctttctcaacttggcctcctgcttaccagtcttgcagccccgcatgggccctggatctgagagtctgtctgggagatagaggtttgcttgacaaaggcctttcacacacctgtggccacacttctccctacagcctggagaatagagatccacagagaccctagaatctgcctccctggcattctcacttacactgtgatcattaaaaagtgtattggaatctactccaggagggcaggaacatgtctgtatctccagccctggaaccatggctgccacgaagtacatctccaggaaacagctggtgagcaaatgaataaaggaataaacatgtctcagaatgttgtgaactacggatttttcattcaaagttgctggaactgaaaccagagaaaggtttccatctttctgattggccgtcttaacacatgacttacctcatagtctaagatggctgctggagcaccagccatcatatcctgttttcagactggaagaaagaggaaaggaagaaggacagcatcctagaagctgccttcctggctgtcatgcacatttcattaggcagaacttagtcacttggtacatttcacttcatgggagtttgaggagggtgttcttttatgacaggggacaatttgttacaccaaagaaagaacagaattttttggctgggtaagttggctcatgtctgtaatcccagcacactgggaggctgaggctggtggattacatgagatcaggagttcaagaccagcctggccaacattgtaaatccccatttctactaaaattacaaaaaaaaaaaaaaaatcagccaggtgtagtgtggcacatgcctgtagtctcagctactcaggaggccgaggcaggagaattgcttgaacccgagaggtggaggctgcagtgaggtgcgatcataccactacactccagcctgggcgacagagcaaaactccatctcagaaaaaaaaaaaaaaaaatcagaactttaatattagagaggaagggagcatggactttgggctgagcaggcagcaatgtactacaacatgcaaaacacccagaatctgccttccaaaatatcagctagttttctagccctggtaaatttagctttctttcatgattatatgatcaatcaccttcttactgggaggactggcatctccatgaggaaataacctgagaggcctttactgagtactaagtcccagctcccagcatcatgcttgtcccggggcagagggaactcaataacggttctgcctcatgcagaaccctggatttcaccatgggtgtgtggacatgcccaggacagcttcgctggtgaggcagggaacacaggcagtgccgctgtgcagaagacgagttggtctttaccgtgtggtggcatcaggaggcctgtggagcactgaggcctgtggaacactgaagttgcaactgtctgggatagtctccaagaaactgcaattcagcagctggaggtggggctcggtgcctgcattcatcttgatatcccctgcattaccacagctgcaatcagtgaagtctcagctggaaaatgaagctgctcgaggggtctgagggtctacatgttgcccgaaggggcccccccagccctgtgctgctctccgccacctgtctgggtggacgctgatggaatgatcatgaaaactgtggatgatacaagtatgagagggacagcaacccaccaaccgcagcagcaaggagaggcttcaccccgcaggctgacgttgaacagaaatagacgtgaggttctgagttgaagcctgaaaagcacagccaatatgtgcataaaagaaacgtgtaggatcagttgtttgagtaccatcttcaaggctttcttcaagtcaccctcataatgcagctgtcaggaaagtatttaatggatactgggatgcattaacaggggcataagcttaggaaagctggaggtgataggcccattggaggtggtccttgcaactcccccttggaaaactccgcagatgtctatgcaaaccattctcccgtgatgggacaagccagccagtgtcctgaggggcatggccagggtggtaatgagatgtgctcatgtaatatgagggagcatagaaggagcaggatatgtccactcgaacagggaagtctctgcaaaggacagttcttcactggcccaggaggcagggggaggctgggttcaagatgcttcaggcaaacatcttgatgctgacatatggatcacagagcttcagaagctatcaggccccacgtggtataggcaaatagtgtgttccccgccaccagaattgctcacccaaagatgggaatcaccagacaggaatgccacagaggagcatctaccctcacactgttctcaatagaccccagttacagagggcgtttccagacaagcgtgagaaaagtgggaatgacgtctgttgggaaacataacatcctctgtcctccttggaagactgaggttgaacttatgggcttgagaaaggccctgaaaagccttgcagtaaacacacttggccacgttggtgacactcccaaacatattggacccacgaccttttttaagatagaagttctctccatgtctcacagcactggtgattggtgtatttcgaggacgccgtctttacagggacttaaggacagccttagggctaggaggtgggtatttagggtgcccttctcaacacagagaggcatggattcaggggcgagccacccttccagtcaatcaagcccagctatgccaaggcctctgtcagatctgctcagaaggaactgtgtctctctcctgccccatcaagctccatgaggttagtgagcacagttaaatctccagctccaagcagagcaggggggtcatagttgatatttttttaaatatttgtttaagaaagaatggggaggggcatcgtgctgcgcgaggtctccagttccagcgatacctattatcaccagttccagcgagacctattttcaccagttccagcaagacctattgtcaccagttccagcgagacctattatcaccagctccagcaatatctattatcaccagctccagcgatatctattatcaccagttccagtgatatctattatcaccagttccagcgagacctattatcaccagttccagtgatatctattatcaccagttccagcgatatctattatcaccagttccagcgatatctattatcaccagttccagcgatatctattatcaccagctccagcgatatctattatcaccagttccagcgagacctattatcaccagttccagtgatatctattatcaccagttccagcgagacctattatcatcagttccagcgagacctattatcaccagttccagtgatatctattatcaacagttccagcgagacctattatcaccagttccagcgatacctattatcaccagttccagctatacctattataagcgagatcggtgggaattccatccagaagattcccaaggcctttttccatacaggagaataacccagaagaggcttcctcaggggacggggctggctatatgtgattgtttttcaacagagctctggcatgtggctttctgtcccaggagagccttggcaatttaaagaggcaattgcttcttgggctcacccttcaaaaatggaactaatggagccacagattccatcacaggagctctggggaactggataaaacccaagaacgactgattctagacaacatcaatatttgtcccattaaaacgtgcagtataaaaatcagttacattgttgaccatgctgctcgggtcctcatgggctaatccctccttatgaaacctgatctctctcactccctcatgctgagaggcaaagagctttgcaaaggggccagtgcatctggccccatcacccctcggagctccatcggtgacgatgtctctggctgaccccatttcgtcggttctttccttcccatatagctaagtcttccggcacagtcgccaatgcaaatcacccacttatgttctcacacaaaattcaattgccaatttgtctttttatttcttacacttaaagtgatttgccttcaaataatctacgatgaattgttcattttactaccgcaggaagcaattggttcatccagggagccactaagtttacaatcattgtcggggaactcgtacttctccagcttccctgtgcagcagctggggaagcccctcggggggctgctgaacagggggtacagtgctttcccccggttcctgtgtcccccccacccacggagtcaagaaccagccacttcttcccctgcctttgggtggggctgggggacaggagtcagtgctggtttagctggtgccctgggatgcaggttcctctctgggaagtcattaattagcttcatttgcctcactggcactggcgtttggccataatggagatggatttgatggtataatccctcgtgggaaatgtgaatgaattccagaggaaggggaattggcccgggaaaacaggcggcctgctctggcttagtgctcctcctcacccacacgcacaccaggccatcgccccagcctgggcttggcccccgccctctgggaagggacatgcccttgctcctcatttgcagatatgaaggcaggtggaccacctctgagaccactgtctcaggcatcacaagcctctgtctctcccttcacaatagactcagacgaggtttgccaggtctgggccatctgagaaacctaaagccttggaaacagaaagaacctggccgcatctgcccctgggctggtctggcttagtcaggagggcagcccttggcccagggcacagacacatgcctgggaaggaaagcgaacgtgtggcacacactgctctcgtctttccattcatcctttatcttttcagcaaacctgtgcgacataggacttgctctcccaacacctgtaactcctgctttgtagagggatgtcaggaaggaggacggaaggaattttgaggtagaaatagtgtgaggcgttctggtcaaggcatgggctacttatccacctgctgacagagatcctcaagctgcgagaaggtgtaatatcaaaagcacactgtggaatttaattggcaattagagatggtggcttccagctggccctctaatgtcctctttcagaaagagaaagtggactgtagctctggaagtaggtgacccaggggaatgggacgtgccaagaactgggaggccaagagccagcacagatctcacatggacacaggaatgctccagaaagcacaatgcattattgattgtcatgaaaggagagactgaagttttatcttaaatgtatgtctgcataaaagaacctgacagggcaaatcaataaacaagaggattgcttgtcgggaatggccagttttattgtttttgttttttttaatccaaaaaatgctcaaagaaagaaggatgacttcctagtcaggtaggtcagagaaggtggcagaaagtgtggtgggaggcctgggaagcagggctggcttgctgaattacaaaacaaaaaagaaacgctttccccctccctccacccacaaggaggaagcagacacggggccttcccaggtggccacggtggaagctgccccgctgtctgggaggttttcgtgggcctgtggacgtgccgcccagcagggacttccacccccagaggtgtgcagatacacaaacagaaaatgcacacacactctggtaagcaactaccttggatgctgtccttggctggactcccagaattttcacatcatcaagatttcattgaaccttcatagaaattctgggagatgagcgtatgccccccatttgccaaataggacatctgagaccacctgctcaaccaagaaagccctctccacctctcgccttatggacaccagagggagacactgtgagagggagcccttcttcatcccgggacatcacgggacgtggcacttgatgaagaaagctgggctagccctgaggtccactccaagcacagcctcagagtcaggcagccgtgctagggaccatgcttcccccagtgactgacggggtcctatgacctcctcagcctcagaggcccactgcagagagtagagacagccacaggccagcagagtgtgacatgaaatgagggatgtgggttcaaaacccctgggcggtgccaggcacccaatcactgccaaatcaatcacggctgctgccattggtctcactggctcctcgggtgttctctggattcctctccttcagcctggtctgaagtccaccttgcagggagacttccactaaccaccagagtggagcgtccaggccccaggtgtaacccagccccactgctccctcttcggtcacaaatgtgcttattttccccttgctcattttctgtcacccccactctattgcaacttttataatgaaggaagctggcagatgaatagcagttgtgttccatatcatttgtcggatggatggatggatggatggatggatggatggatggatggatacctgctttttgtcagatctcagactggagttacagctggaaggaaaactgtcaaacctataaacgacaaaagcacatttcaaggcatggtcagagtacagggattggggggcaggactaacccaatctgagggactcagaatgtggggcagagctttggagatgcagaagaaaagggtgaggaggatggcctcatgctgcactagacccacaggtcctctgcctgtgcgctgtcaactctctgctctgtagagagtcctgttaacatatttaaacaagtagacttgatttcagactacacagatcacctctcccacagtgtcactccagctcatggccaccgaggactgaagcacagccaggcacatccagaacccacagcgggagcgggttccgtggagcagtgccaggcattttgactgctcagcagcatcttcagcctgaagaggcaccagcccgaaagcctcagtggtctgtcactaatgatcgtttaatactgtttggtatcagttttgtgtacacacttccaaacagagtaaattgcatgtgggtgtttacatttaaggagagcttctatgttagaattgatagaactttaatttccatgtggcttccacagtaaacatgcaaatggctcttttcagtattaccaagccttagttatttttagggaagcaaaatgttttactttagcccccagactgcatggaattaaaagcaaatccagatgggaccagattggagaaacagtgacgtggacagaaccagcttgcatctcccgcctccttccttggctcccctgggtcccaggggccctgacccatggcctgagccggatgggggatcctctgctgtggatgttttgcaacctggcaggagtgaagcatcttgtgtggagtaacagtgagcatggaccactcctgcgttagacgagatctatctcctgcaatagggatctaaggcatctatccccggggagaagaaatgggacagaagagggagcggaagtctttcccaactcttctgaatctgccctgatgagaggcacacggtggagaaacagccacttctgcacttcagcccatgctgctgggactcagggaccctgagctctttgcgatttagttacccgtgctccaatccaattccataaatcggagacagaggtggaagctctgagcacaaatgtggatggtcgcaggagtgaaagcagatgatggccgggactgtccacactaggacttctcctctaggggcagttctacctcccaggggacaaggaacaatacctggagacctttgggttgtcacagctgggtaggcgctaccagcatttacagatgcatccccagcttcggaggaggccggggctgctgtgagcaccctacaatacctaggtgggacggccctgatgacaaagaactctctgctcccaaatgtcagtactgccgagatggggaaaccctgtcctagagagggcagcaccatgccctgcagagcctggaaatgggccacgagtgggctacacttgcctgtgcccctgctgggtgctcaaggcagcctggtgggtggggccagtcggagcccccaggctgtctcagaggcttccagcagcctcatcctcccaactccatgagccagacaaagttcatcatggtctgtgtgtccttggaggtagagaagtttggggggcctggttagaactcgagaagcagctggctgttctcatgtaccacgtgaatgtgatgattagggcggggtgagcggcaatggctgcccttgctgtgtgtggcctgaggcctctgcactgcaccttgggcatgcgtgaccctatcttagactctctgcagcccttcgaggtgaggtcagcaaccattcccacccatggggcaggaatctgatgccaagaaggcccctttgtccaggataacacaggtacgcagggcccagtgatcaggatttgaagtttcacgcccagcagcagcccagcctcacccagcagcagcccagcctcacccagcagcagcccagcctctcagccacactgcagagctgcctgtaaccaacagccacccgtgatccaccacaaggtgcaagaaaacaccttccgtgtctttcagatgaagaaacaagtgccccagggcctcctccccacctgtggtttacactctcagaggccaggggaagagatggctaaaggcctcattaagtggctggagccttgtgggcttagccgtgcctcttgctttgacagctgtgcagagctgagtgttttcagagctagggaaggcgagaggggctgccctctctcagggctcctttccagccaactcacctctgggccgaagcccatctgcgagaacagaccctggccccgcaggaacaaagagagaaactgcgctcctcagggcactcagtggacctgcctgacagccaccttgccggagcaacaggggttcctagagggacaagaagcttcacggctcagcacacggattactcctcaagggcccacaccaagccgcttctccagtgagagagggctcacagcagaatcgcagcttccactgcaggggaacatggagatgacaggtccaggatttcactctgcaggggaggacagcaagccctgagggaccatgttggacataaagaccccagtggcagcaagctggtgccgtatcgatggggggccgaacatgacctggagttgaacgacactccaggaagctcagcgggctgggagccaggacctcgcacactggaaggggggttcccagtgcccagagctgtctgcccctccatcagcccctgagctgactgtctttgctttcctggggagtcgatctcattctccacctgccgggaggacagccccctacagcccaagtctgcattcttttctgaccatgagaggtggtgtgtggccacccttacaccactgattcaaaaacccggcaggtgcctctcaatgatgccaattgcagccagcggcaacaccagggctgagtgttctggaagggcctcaggcagcggctcggtgtttctcacaggctaaaatatgctggccgcagagagagaatgacgggaaggtagtggccagccctaagcgctggctcccccaagtccactctgggatacacagaggtgactaaagagagctggggaaaggtctgggccgcagaaacccctgaagagttcgtggggaactgaggagcctgccttctcttgccatcttgaaaaagaaagaaaatgaagcaaggatgaagacaagttcgggagacacacagagagctcctgtcatttacccacaggcgctttggaaggagaggtgatgaggcacggctcctaccccagggggcttagaattagttgagaatgcaaaaaaataataataaaaaaataaactgggctcatcaatgaggccgtcttaaatatcacatttttaaaaatcagaagagattaggcttggggtcagaaagacccaaatttggcctcctgcagactctgagagcttcagatgaacggttttatctcataagccttcatgttcttatctgtacaatgggattaatgatactaatagaattgcctggtgggacacatacccatctttcccaccggagagaaagtttaagaagctaaggggggttattgatcatggggtaaggggatgcataggcagatggggttggggtgtcatctgtttcccccaaagtccctgccttgggggacagagtactccaggatacatgtcctgagaaataactgaattcccaccccactcccatcaggaaaggcttctcagggttgcaggaaggaggagaggcagagggaggtgatgcatgcaagccaccagtgtgaccagacattttctagtagccatactaaaacaggggaaataaataggcaaaataaattttagtagtgtattgtacttaattcactatatgcaaaatactatcactttgattacaacatgtaatcaatataaaaatataaatgagaagttgaacatacttttgttataccaagtcttcaaaatctgacatatgtttcacacttacaacacacctcaatttagacaagacaaatgtcaagtgttcaaagctcccaagtggccagtggccatcgtactggatggctcaagtgtgctggggaggtgtgtcttacacgggagccttcacctcctgagcatccacctcatggaacccacagtgttgggaactgaggctgtttcctctgtgatttcagcttggggtgatgtgggaagtccccagtgcccttgttctacacagcaaaagtcatctaaagtggtttaaaactttctgtaaaacatttaaagtttttaacatatctgcagtgaactttaatgggattccataaaaattgaacagacatcagaatgagctgaaagagtcagtggatgaccttgatggttttaattaaattcaaagtgaagagtcaagaatttgagagctctatatggccagcaactcaaaaagggtcaagagcattcgagacaggaccaggtgaacacatggaccccttcctgcccagctgattctaggattgatttgaaccagctcacccaggtgtgcggtcaaagaagtaacatttcaggtgtgattccctaataaagttccttccagaagggcagaacatacttctacacaaaccctactccttctgtttctcaccttagaggacctacctggttgtgatggcagagctcacacaagtcatgataatgattcttttttttttttttttgagacagagtctcactctgtcaccaggctggagtgctgtggcgcgatctcggctcactgcaacctccaactcccaggttcaagcgattctcccgcctcagcctcctaagtagctgggactacaggcacacgccaccacgcccagctaatctttgtatttttagtagagacggggtttcatcgtgttggccaggatggtctcaatctcttgaccttgtgatctgcccgcctcagcctcccaaaatgcagagattacaggcgtgagccacccgcgcccagctgataatcattctttaaagcacctgtgtttcttgtgggatggtagttcagagaagctggaggtatgtgtgcatttgtggggtgggaacagaaggacgcctaacgtggggactggctagtgaagttgtcagtcaagtttgtgaatgacttaaattatagatcccagcctgagttctaaaaggctgcaaactgcttcacctactgcttctggtcagtcatcagcatcagtcagaacagtaaggtctaagccaaaggcagctcccagttccagccacccagacgcctccttggcccaggcagggatgctccctgagttctctgaatctccttgtcgctacttcttcccaggcctcttggccacttatcctgagcactgtgcgttatagttatgtgtgttcttgtattatctcccctgctagattagaagatgtttaaacagggggtttggctcatcactgttctatctcccagaagttcccatggacgagcaaaagagtaagtcaaaagcatgtgttgagagacaatcaaggcatttgacttcctctggctcctgtcattgcttggtagcctcaaaaatctctgcagtctgggccaggccgtcttcctctttctccctccttttctctacttttttggctttgcaagtgccacaatgggaagtctcaattaactgctaggctcggagaagatgacctagttaactaaatgaatgaatgattaaagctaactaaagagtaatcagcaatcatttttctgatgcctatgaaaatcctcattgttgaacatatttttaaacgcagaagtacccatctgtctaagcgacattaatgcaatgagtatttgacttctcctcgatgactaaggaccattgtgtggtcatgatttctcattatgggtgcttctccaggctgtccactctaccttcagccatcggtgctcacctcctgcaaacttcttctcataaaggattgcatggcttccaggtacatccaatcctaagtgcaaatcaacagctcccttgcccattgtaatccaaaactctatgagaatatgcactagaaagtgccaaattgtaagccgaaaaagttctgtggaacgtattttgtaaaagccacaaaagaggctggcacatactgtcaacccaaacctgtccccaccccttcctcttcacttagagaacacacatgtattttatccatgcatcaagtggccatgtgatttagaggagctggggacaagcagccctgattagataaaccggtccgctcagcagcgatcagcatagtcctaaaatgattggcattgacaacacaaactggaacatgaaaagcagtccccagggactcctggagattttccctaccttaaagggaggcacaacactgttctctctttctgccttggggcaaagttgtctacggataagatgctccgtgcaatagcagccactttgtcaccatgagggtgagatctgagaagcatagccagcaggatgacagagaagaaaggggagagatctttgttctcactcatataaccgatcactagatctgccagcctggaatctccagaattttccattttgatttaggttgttaagtgaggctttctgggacttacagctgaaatagtaatggatgcacagaactcttacctccctctgccctacaagtagatggcagtggaaaataaagagaaaaacacagtccagttaattttgtattctgagtggtctggttctaattaatcataattttatttatatctttaactttttgttgttgttttctaggggcattttgcagccatggcttccaagctgtaagaagtcggccacgtagacttgggagtctctgcctggctgcacctctgccttaatctgttttcctcaccctagaagctccacaccaaaggcttcctcttaaccctcacacctggatcctgtataagcatgtctgtctgctctgactttagcccagatggtaactcctcggcagctgtaaacatccgaacactctcatagtcaacaaaacaacagagcaggaaggctacagcccagcacaccaggaggctcatgccaaggcacggaggtctgtactggtcactctgcttccaggaggctcgtgccaaggcacagaggtctgtactggtcactccgcttccaggaagcttgtgccaaggcacggaggtctgtacttgtcactctgcttaaatgcaataggttgaagtacaaccagtcataagaaacattctttccctttgtcctctaatttttaatttttgaaaattcacatgcactataattcacttctttggtttacaattcagtgagtttttccacatgcacagcttcttgtgtccacccccacagtccgcgggcagaagcattccaactctcctgtgctctccccacctcaatctgtagcagccatggatttattctgtgttcctacagttgtgcttctccaagaatgtcacatcaacgggctgatatagtaggcagccctttgtggctgcattctctcacataccgtaatgtactcagaattcaattcgtgggggtgtatgtaccaacacacaatcctctctcttgctgagtagtattccatcctgtggatgtgccacggtctgcttatccagtcactcactgaaggataactgggcgtttgtgattatgaagagtactgtgttctgcagcgggcaggcctatgcaaacagacctccaagtcagaggaagctgagaggccaagaggctgacaaatccagtttctcagaaagaaacatttactaggggcttatgaacacaagtcacatctgtgtttcaggtggcgttgagaagagatggtggatccctgtgctgcgccttcccagacacagggctcatagaccataggaaaggaatgcagtggatacttggagttgactccttggggaaaggcaagaatgtcatgtgaatctgcctgagggcaggattaatggtcaagattgttttgacctaagggcaggatttaaggtaagtgcaatgctcttccacaaggaacagttgatgaaatagaaatcttaaaggcattcccgggactggggtgaatcacaagccaacatgcagatcaacatccgagtgggagctgcgccagcctccgggtactgctttaaacactcatggacaattctatgtgaacatcgattttatttctttagggtaataccaaggagtcagagtgctgggggataaagtaactgtatgtataatgttttacaaaactgctaaatggctttccagagaggccagactcttttgcattctcagctgcaataaatgagcatccttgttgccacatcctcaccaacacttggtattgttgatctatctatccatatatacacatatatatatatatattttttattgttgttgttgttgtttcagatggagtctcactctgtcacccaggctggagtgcaatggcacaatcttggctcactgcaacctctgcctcccagattccagccattctcctgcctcagcctcccaagtagctggactacaggtgcccgccaacacgcctggttcaattttttgtatttttagtagagacggggtttcactgtgtcagccagaatggtcttgatctcctgacctcatgatccacccacctcagcccctcaaagtgctgggattacaggcatgagcaccgcacccagccgatatttttaattttgtccattctattagatgttaatggcctctcctcatggttttgctttttttatttaaacagtttttaggtacaggtggtttttggttacatgaataagttcttcaatggtgacttctgagattttggtgcacctgtcacctaagcagtgtacagtggacccaatatgtagtctttcatccctcactcccctcccaaccttccccactagttcccagggtccattatttcattcttatgcctttgcatcctcattgcttagctcccatttatgagtgagaacatacaatatttggtttcccactcctgagttacttcactcagaataatggcccccagctccatccaagttgctgcaaaggccattattaccttctgttttatggctgagtagtatccatggtgtatatattggtgtgcatatactacattttctttatccacttattgattgatggacacttaggttggttccttatgtttgcaattgtgaattgtgctgctataaacatgcatgtgcaggtgtctttttcacagaatgacttcttttcctgtgggtagatacccagtagtgggattgctggatcaaatggtggatctacatttagttctttaaggaatctcctcactgttttccatcgtggttgtactagtttgcattcccaccagcagattgccattcccctactgctcatgatattgggtgtcccgttgcttgatttttgtagatcttctgtagctcttctccagtaaagcatctgttcagatgtcctcctgagacactgaccttcttattctctagcactcttccttactccacctgcaattaaaatccctggtgatctggactcccttaccctagagtttagccaagcccctatgcaggatttctataactttaccgttcatgttttctatggctgggcactggagatgacacgtagatcccaatggtaaaatccagttcagtaaaaaggatcccttgaatgtatctggaagtttctccagtgccagggtgagtgctgcaactggaaggacaccccgggaccactaggagaggacaaggtcaccgatgagaccgataagactgccagcagcaaacattcccaaactgggggcaaaggtttcatgggcaggctcactccctgaccacatgcccagtgctggtcatgcagttgggactgagattgtcatagcgatgggaagactaccctgggcgatcattatgaaaagccttctgtgggaggaggctgtggtttttgttttcttaacctgcatatgcatgcgccaaattgctttggctttaggaaagctcactgcctgtgtgatgggggtaggggaagcaatttttaaaaaatactaaaactgattacatctgtttattccttttcagaaagtggatgaattaatttcagctgtggattttttcaatttaggaaaaattgtaaatggaccttttagctatgaaaggtaaaggcccattgacattttccatgggagaggttaagacagagtgaaattgctctgcctaaaaagtaatgcaaaagttcaggtaccagtggcctcctgaaagaaatgggcaggcatcctggggctccagcagagaagactggaggcagggcttgctggagagactgaagaccagtcccccagcaaggcagtggaggggtctggaggaagggggcagggccagggaagcatcccggggcggaggcagatgtccaagagacggggctgacagcgacgcctggtgctccacgccccaggctgcagtcacccagtgttacccacaaaccaccattccatggcctgtgctcccacttgcacaaaagtcacaggttccagggatcaggatgtggacatctttgggagccattattctgccccctacacctaataacacgaatgtcttagaaaatggcaaatacacaatgtgcctaactgacagcggggttcctggggaaggatggtaatattttgtcaaaaggctcattccagaccaataatcctacagcccacggagaaaacgatgcatttccctggatccagccagatcccgagcccatgagactgcagtctctttataggactcccagggcccggcgccctcaaggcctcgtggggcaatggcgggattgtgctgagcagaagagtccccagagatagggcagccgctgcaggacagaagatgagagggggacccaggagcgagcagagatggagaccagacgtgactgctggccagccaggaattctcagcattctcagaattctgaggatttaggaattctcagaaatgctggccagccccacacctgtgtgacacaggcctgagctacagtttcccgggcactaaagaaagggaagctgtagagggcaggcagacaagcccatcaccatggacatgggcaccataatgaccaaatcgcctaagagccttgaactagccccggctttgcctctccacaccttggggtccctctgggatatgctagctttgtccaaattggctgtattttgttagtggagcagcactcttcatacttacacacacacacccagccaattccaggaagagcctcctgctgaccagcagcagggcctttgcgccaatcactaaatactttcctgaaaggcgtttccaggatcatgcatgccttcgggagcccgtggtaccctgggcagcttgttccactgccttacacacccagaggcagcagtgccaggaggctggcccaagaggcctggctcctaccatggttcttctcatcccaccaggctgaccgtggctgggacagcagaggggggctctgaattccctgtggacgccatgcttccagacaagtggaaggagaccgtgtccatctgcagccatcatcgcccggcagatgccctacgtgattgatggcacgtgccagcacaatctcagtgtgcatcgctgtaggaaacttaattgatgagagaattgtcaggaaggattctgggcgtgttgcgggggtgtatgttaaaggcaaatcgaaagcgagagaagcattgctttgaaataaaatgctctcccattataatttgtaatatttccccgagaaataatcttcctaatttttttaactgagactttagaaatcaatctcagtcaggtaacaaggcagttctcagcaaataagatgcataaagagtacacatgtctaatatccaaagacaagaatgcaatttgaaatctcctgggagggcaggccccgagccacagtgcattccagttttgggaaagcaggcgtgcttgcaagggactcaaacatgcactgacgggttgataggatgaaaggtgctgggggctgggtgggtggggaggagcagggtgctgggagctgggggctgggggtgggaaggagcagggagcaggtggcagcagagccaccctggcagctgagacccggaggcaaagacactgtccctgagcagccatggcctcagatccactgtccggttatttcacaagccaggctgcaagactcagcccaacgctgctggggtgacagctattggcaattgttctttgtcaccttcaataggattgactagagcctggtcatgtgtccagagcacagggaggtggcagtgaggctcacgaggaagtgagaggggccgtggttcaggtggcccttctgcctgaaagaggaaccatgcacctcagctcaacacatggaatgggcgtggtaggagctccctgcacccacacccctgagccgcaccaaggtctccacgatctgacgcaaagtccaaccctggggagactcttcaagtctggtttcttcaggtttcgtgctgaccactgcagggtgggcccctgagaaccccgcaaagtctgctgcagctcccacatgtgctgcacaggccaccctggtctcctggagtctgctcaggtgtgtgcagggtggaccgcccagttgcccccagttctactgctgctcacacctgcactgttcctagacgtctggagatgacacgtagatcccaatggtaaaatccagttcagtaaaaaggatcccttgaatgtatctggaaatttctccagtgccagggtgagtgcactggaggccccgctgctggtcagcaggaggctctccctggaattggccgggtgtgtgtgtgtaattacgaagagtgctgctccactaacaaaagacagccagtttggacaaagctaatgtatcccagagggaacttgaggtgagaggcaaagctggggctggttcaaggctcttaagtgatttggttattatggtgcccgtgtccatggtgatggcctcgtctgcctgccctctacagcctccctttctttaatgcccaggaaactgtagctcaggcctgtgtcacacagatgtggggctgaccagcatttctgagggtgagggcacccaggcaccctgaggcatggacactcttctgaggcctgggtcctgggacctgcgtccgttcccctcacatgccctgaggctcactcctgccccgtccctgtccctctagagggggcttctggtgacccctttccaaggacacatggcctccctccctgagacccttaccgaatggagagcctgcaccgctggtgtcagaggcggaaacactgtgtggcgtgcactgtcaggatccagttttacccacgaggagtggagaatcagtaagtccttgtgcagcagagccaggagcagaggcttcatggcccctccggaccccacaccttaatgccctctggctcctgacgtccaggcagcctgcattggctgtgacaaatgaccacacacagcacaactgattctcttacggctctgagattaggactcccacatgggtctcccagggctggagtcaggccttccgcagggctggctccttcatggggctgtaggggagcgtccatcgtcctgcactcctgcctagaggctgctgcattccatggccccttcttccatcctcaaagccagtaagggcaagtggagtccctcaaatagaatcaccgtaaagacccctgtgattacagtagacccaccctaacaacctagcacagtctccacatttcaagatccttaacttaacccccaaatgcacagccccttttgccagggacggtggcacattcacaggctccagggatcaggatgcggacatctttgggagccattgttctgccgacacacctattacatgaatgtcttagaaaatggcagaaacacaatgtgcctaactgacagcggtgttcctggggaaggatggtaatattttatcaaaaggttcattccagacaaataatcctacagccctgggagaaaacgatgcgtttccctggatccagccagacccacagcccatgaggctgcagtctcttcacaggactcccaggatcccgcgccctcaaggcctcctggggcaatcgcaggattgtgctgagccgggccctgacaatagtctccactgcatctcggaaccctaggccttccctgaaatatcactgccaactctccatcatcacacaggaaaatcctgtcccgaggtgaccatggacagcctcctaagtctttcctgctcagctcagagcttgggagtctggctgggccgggaatcatttatctgcccgtgaaaagatcacctaacaccagctggctgaagtttttaaaaagtgtgcaggtggggactgtgggctgtcactggggagttccaaggacaaacctgggcatctcagttacgtcttgatctctgggctcaaaagatatacccatgctttgtttctacctcctcacaagtgggcttcattctcaggcctacctggtgacctggaccaggctcatatgccccaggtaaaccccagttaagaaaacaaaacaccaacacatgtgactctctttcccctatgcaagcaaaactctataatcatgtttcattggctcagatgtggtcacatgatcactgctgaccaattacagcatctggggccggatgccctgatcacctgtccccactcacctgctcattcctgggataataccctggcatcagctccataaaaagcacatgggctgagctagagatggtagctctccaaggaaacctattcctacaagaagattggaggtaaagggagacaaaaccccagaatacttcctccccctaatttctagtctctagttaaatagtctacagccagctgccgggtgtggtggctcacacctgtaatcctagcactttgggaggccaaggcaggcagatcatctgaggtcaggaatttgagactagcctgaccaacatggtgaaaccccgtctctactaaaaaatacaaaaattagccaggcatggtggtgggcgcctgtaatcccagctactcgagagactgaggcagacgaattgcttgaacccaggagacggaggttgcagtgagccgacacagtgccactgcactccagcctgagcaatggagtgagactctgtctcaaaaaaaaaaaaaaaaaaaaaaacacagtctgcagcccgccgcccgaatgcaaagtgtggcggtcgggcatgagtgaaacgtgatggcgctgccccaaggcatccctgaagcctttttcagccctgggttggggtcagggtcagcacagagtgacttcatctcacaggagacacagtgtcagggcgtcaaccagggcccaacttctccagtggggtttgctcggggtgaggaaaggcaaggtctgtgcatgacacgtgctggtctttgtctcccaccagcaatcctgtctgcaccgaaatactccttcctgatctagtggctgatctggagaagcaaatgtgtggatcttggtaaagggctgatttcacaggcacatagtaatggggtattttgagagtgtatctaatccacgaatattaagaataaaatatgtttgatcaatgaagtatttgtttgcagcagaatagtcctgggttcagcccaaccaactctcatggcttaattactgtcatcagactggtttccagaagaataagggtattctgacacgcatcaatctggcatcatggtcacaggcattcagagatgagtagccgcctgtcgcctttctagtctgtatcggcaacacgtcagaaccatcgatgggaaaccacctcatattgataagctggtgagctaaaaatgctcgtgatggcatgattgatcattgcatattaactaaggttattagaacagggaaatgtgaggctttcactgcctcctcacagcactcaatttaacaatccgtcttcatttcccttgtgtttcttcttctgcgcctgttttttttttcttatcctcaattaattacagtcagttagatgatgaacacaatgagtttcatggtgtacctgaagagacctgctcttggggagactgtctcagtgcaaaaatgtagcaggttagttccagaagatttagtttctgctggcaggaacctgggagcttggaagaaggagccaagagccatcacaagcatgtccccgaggcattcaaactggagacaaagagccctaccctggctcactctacgatgctggtttctgagcacaggtgtccttcgcatcctgggactggacaacagggaagggagcggggctgggtaccacttggttttagcaaggaaggtcatatagtaggttgcctgtttctacacatttctctcagtttgtgggatggagttttcttggccctggaggaaggacaagaagtcaaactcaaaactgctgagtaagtggagggtgagaggggcctgagttctatgacatcagtggccccaaattattttgagttggtctgtgtttccttggttatgtttactctaatgtagcgccatcctatattctaggaatattcccttgaaacaaaataaggaaactccgctgaagcctcacttcagattcattgtttctttcagtacacttttattgggcccctactgtctgcacagagctgcaggagcggctgtggacatggggagggaccccatggacctgttccccagacagagcagcggatatgggaacaggccctggaagaagactctctgaccttgaaactgagttggtcatttcacagctcagatatggtttggctgtgtccccacccagatctcatcttgaattgtatgcataagcaacatgtgtcatcggaggcaccaggtcggaggtaatgaaatcatgggggtgggtttttctcatgatgttctcatgatagtggataagtctcatgagatctgatggttttataaatgggagttcccctccacacgctctctcttgcctgccgccacgtaagacatgcctttgcccctcctttgccttttgccgtgattatgaggcctccccagccacgttgaactgtgggtccattaaacctctttttctttacaaatgacccagtctcgggtatttcttcatagcaatgtgaaaatggactgatacagtccctgagcctcagtttccttctctgtaaagtggaggtaaggatagtgcatgttatcatggttgtgcagatttaatgagatcatctggcatatgaatagcccagtatagcactttacccccggtggctgctcaataaagatcgtctgtgaacgttaattagggaagacaagccccatcccagtgacaacggtgcaaagaggaaggggttagagccacagacagagcactggtaatggatctgcagttcccaaagtgtgaccagcaaaagctgcgtcacaagcgaatgtgttagaaatgcaaattcacaggccccactggacttgctgactcagaagctctggttgggggtagtgggggcagctctgtgttcactgccctgcaggatattctgatactggctcaagcctggcagccgctgtgatcacctcctacagctggagactggaaggagagagtgcccgctgctgggggaccctgcaaggttcgctgaaggaggttgcaaggggacagagtgagagggggcttggcagttcacagagagagaaataaatatgtaaccattaggtttgtcgctgagtttccaacgtttttgcatcgaagttgctgggtgtcaggactttccctgagcccttctcatcccaccaggctgtctaatggtcctgagcactgtgaggtcctctggggcagccacacttgtctgtctttcctgtagtgctgggaactcatgggggccacggtcagagactgtagcagctctgtgacaaatttgctggatttagcaggcagggcaacacaaatatattatcttacagttctgtaagtcagaagtcagacatgggtctccctgggcccaaatcagtgtgtcttcagggcagccttctttctggaagctcaaggagagaacccatttcctcgccttctgcagcttccagagcccccttcctccaccttcaaagccagcactgcacctctcagtgctgttcccacagttccatccccctggccccctctgaccctgcctctcttctgccttctgcctatgagaaccatggagatcacggtggacccacctgggtaaccgagtataacctcaatttccaggtcagctgcttagcaaacttaattccatctgccgcctgaattctcctttgtcacgtgaggcagcacactcaatccacaagttccagtgattaggacatggacatctttgaggtgcaacattctgtccacacagggcccatgttcctctccatctgttagcctggtgccccaacagtgtagggtggtgactaagagtgagcatttgtgagtcagatccatccgagttcagtttgcagtcccctgcttttccttatgtggccttaggcaagtttctacacttctcggagactctgtggtctcatccgcaaaccagcgatgacagtagaacctacagcacagggacattatgccaaactcttgcaatgcccttgtcactgtgttattgtgaccattggaaggaaaattagagctcgcctgctctgaccccacctcctatacccaccatctctctgtcacctctggcagatggtgcagtggggcagactgtctcctggtcagcagtttctccctaccctctggccacactgccaatgctgcttgagaagacatcctggtgccatgctaagccacatggagtggctgtaactgaccacacactgagtcccaggatgggccatgatggactggagccaatcagtggatcccaggcctctaaccaaaaacatgtgtccaggatgggatcctgtccacccaggtctggagcccacacaccacatctccagagcctgagttggccacaggtacaatggagaagcttcgggtgaagctgatgttgaaaaaggtgggggagagagtcaacaggagctcaacaatgtcttcaaagactgttgttcaagcctctagatccagccttgcctgaaggcagccctacttggggacatttatgtagacgacccagtgaccatggattctctttcacttgctgcacaaggagtctggtctttcagttctattcaatcttctcccaaaatagcacatcttctttggacaagattgaaggggatgccttctagtcaaggaaggctgtatccatgtggctgcaactcatttcctaaaacttcgttcttccaaagcaaaacaaaacaaaacaaaaatccagctcatttgtttcacaggaacttactaagtgccctcctcttttgttctgaagccttcaaatatttttaaaccattgtcctttcccttggcctcctctcttctgtcttcatatgaccagtttctttactcagaccctacataacttggcttgtagatctcccatcaccacagttagactcctcctccaaatgccacttttccaatctccttttaaaactgtgaagtccccagtaacattggctgtcacataaacccactctggatgtggccagatacagctgattctagtgacatattgtgtctgttaatgtctggctacatcttaatgtgaagcgatggttcacactgacgggatgtccgagtgggaaggcaccctggtcaagagggctctgcatttgtgattttacatgacatacatatgctactgatggctcttgatgccattaggaaccaccagcaggaacagacatgcagttatgcaaaccacatcctttttgtccagtggtcctggccagcctcagacagtgacccagccctgagttgtcagagtggatggtcagcaaggtgtcagcttggatttctcaaagcaaggctgatatggttaggctttgtgtccccacccaaattccatcttgaattataatccccacaatcctcacctgtcaaggacccaatgggaggtgattggatcatgggggaagcttcctccatgctgtcctcatgacagtgagtgagttttcaagagatctgatggttttataaggggatctttccccttcactcatacacacttctcttgcctgctgccttgtaagacatgcctcttccccttccgacaagatcgtaagtttcctgaggcaaacccaatgctgtggaactgttagtcttttctttataaatgacccagtcttgggtatgtctttatagcagtgtgaaaatggactgatacaaaggccatctcaccaccccttgcttgcatgggccattgattttgacttaccatcagggcccagcgaccctggccaggcatcctttggaccactcctcacactgcccagactggacaggacacaaccctggaaaggcctggctccctctccacacagctgctaggcttatgagctctgaaaggtacaggcctccaagagcctccattcggccttcaataatgagagggggagaagagccatctctcagccacagctggaaggaagtgggcttcatattcatttgcacagctcctctcaacctggccccttcttttttcaagtagcaagaaaaaaagctgagagagccaggagatggaggctcttagtagatctttaaaaggggcaattttgtttcatttatctgaaaagtcacaccgcacatggtgaagggggaagaaggagaaggggaggagaaggagaactcgtggaggatggctggcacccgggaaagcagaccccctcatcctctggctccgtgagtgggttccaggacatcgtgcaggaggtgactctccctgactcaagctgagcctgctcatcacagtgtctggtgtgcatgatgtttctcttatttgctaggttcaaagctttgtgcccacagcttctttgctggttctttcacacgtctgcccagggcccagcacctgccatatctggagtgctttctgaccccgacattcctgtcacctcattcagttctctgctcactcatcacctccccattgagccctttccccagcccccctgcctagccccatccagccttcctcacccatagcgagctctgcctgctctggctccttgtatagactggctgctctcctgggtggccggagcagtctggttcaaggtataagaccctcctctactctgtaactgctgtgattgaggggcctaactcgaaccccaggtacaaactggagtcacaaccaggacattcagccacacacatgaggctatgccctgcacagcaacccgtgtgtagaagtctcatggagcttccgtaacaaatgaccacaatggggaggtatattccctccgcattctggaggctagaagtctgaaatcaaggtatcagcagggccatcctccccacagaggctctgcaggaggacccttcctggcctcttctaccaccgatggctcttggtgttccttggcttggacacatcactccaatctctgcctccacttcacatggttttttcctcttctttccctgtctctgctctgtgtgtctacttttatttttttatttttttgagacacagttctgctctgtcacccaggctggagtgcagtccagctcattgcagcctcaaactcccagatgcagtcatggcttactgcagcctcaaactcccaggctcaggtgatcctcctacctcagcctcccaagcagctgggactacagacgcatgccaccatgcccagctaattttttttcttttaaagatggggtctcgctatattgccccagctaacctcaagctctggggcttaagaaatcttcctgccttagccttccaacatgctgggattaaaggtgtgagccaccgtgccctgtctatttaaggatacttgtcattggatttagggtccacctggaggatacaggatgatctcatatcaagatccttaacttaatcacctctgcaaaacctctttttccaaataaggtcacatttacaagttcttggtattagcacacatatctttctggggatcaccatatacttataaataataaaattgtggacattgtataaacactgatggcatgccagtcaaggtgttacatacttcacttttgtttgcttatttgatctgatagtccctatgccatatctccccccgctcccaacagggagttgcactggacttccaacaaggaagagaggtggccttatccccatttcacgataaggaaactgaacatcgaggaatgtacaaccagcaggtggcaaataccagaactcagatgcgtgtcttccaggcttccaaggctgtgctcccacataccccacagcaactgccttgcagatgaaggtgctggggctcagaggcttgcccaatgtcccgtggctgagaagtgatgaacagagttgaaattccactgcttcccattccaggctcttgctgctgtaagatgcctcctcctcagggtccaaagtggatggagcagcctctggtcagatggcaccatgtgctgggttacaatacagaaaatcttccctcccttcttccccgggccacttccctcatcccactgaagtcttgcctcatctcactgaagtagggcttggataagtagcttgttcaggccaatggaacataagcatagacaacatgccaatcctgagccaagcctaggtggcatctggtgcttcctcatggcctgttgtgttcctactgttaccacaaaaaaccatgccctgggtagccactaattcaaggatgatgggaggctcaaggagcagaactcaacccaattcacaacctggagcctggaacctagagccaggagctgggagtccagagcccaacctagcccagccgtggtgccatgcaactctcttactggctcataagtgagaaatgtctgttgttttcagcctctgggttatggaaagatttgttactcagcattattacagcactgctaactgatacagatgggtctaaacttggatggttaacaaatatggaatatatctttagaataacagattattctctgattcagaaagaatgtacaacataaaatccaaaatagatggccccatgctaactgaaaccagtattcaagctagctctttacaatttaaaaggaaattggaatttgagatgggacaggcgtttttcattggagatgttttgaatggaagcatcaagatctccaaaaacgtacttctcactttttaaaggcttttgtttatacctaacactaaactgatgctagattgaaacatcaattgacaacctggtctgtcaatgaagaatgttcaacttacatgtaaatacatgtacaaacatgggccttctattcagtcagtctcaattgaaaactttcttctcaaaattcactctaatatggggattgtgtttatttatgggtgacagctaatttgctttcttcctgtaataaaataattaaaatactttgctctacgagttgtattttttcagggtgatcctttcattaaaagtcatttaatatccttctgttctgttatctgctacatttcaacttttgtgttttctctgctctccttgtcttctgtcatatttctcattaaatttcccctttttgtccttttgttatgatggcttattttctgccctaaaacaagctttgaacttaaaaacctgaaaagcattttatttggaataaaagaatccacagtgtcacacatttgtcagctaatgtgttcctgcctatgctttgttttaatttttcagagtgattgtttatgaacgaggcctttggtttcttggaggctggtttggtctttctacccattcttcacagaaaacggtaatcctctgataacataatcatcactgtagcaaccggaggcgatgtcacaaacaggattatgacttaagagcccagatttgcatctcacacccactacttacgcgccaggcgcctctttggacgccactccacagcctcgtgtgttaagaggcacacaagagctgcctgattggcccccaagctgagaaccgggagccggaggaaatcatagcgaaatctcaacctgatgtagccccatcagcatcacacacacactcagagcaaaatggcctgctcttcaatgtagcttagtttagttcaattgtcctgcccaccccctcctgaccctcctgccgctgaggggtggtatttgaaagaacaggtgagtgcttcataggtgccgggttcgtgatctaattctgggttcctcaatctattaacagcttgggaagaacagatcagaggactgatgctcacctgggtttggattcctcctttagcctttgacaagttacttaactgagtaaatcctcaattttcaccatgataaaggaaagatggtgtgtgactattatgtttttattccggattgaaatactcagtgtattcataaggccagtgaaggcagcacagggaagttagtgtgggctggtgctgtgctcatcaagtccacagacaccttaggggttgtcagggtattatctgggtcttctgggtatcccagtggtttggttggcgattgttcacccatttcacagatggcaaaactgaggcttatggagtttcctgtgatgctccagttcacagagctaaaaggagtagagtgatggctcagacgcgggcctcccagctcaagttctgtgctctggatggaaagtcagggtgaccctgaaggacggggcagctgtgcagggacaggataggcccatcctggaaggctcattggctgagggaaagagggtacaggggaaataattccctttcatccatccatccccattattgctcctaaacttcccttccacctccagcttctttcctctcttctccttgggacagcaacagcacagagagtgggccgccatctcttactgcccactcaaccgttgctggggactgattctttcagctctacatagaattcaagaactatatttggatctgcttcagagcagtaatccccacagccttaaaacatgcaaaataaaaataaattaatcatccatcagcattttatggtacatttataattttatttaaatgtttaatatcataaaacaagcttggctcatggagaaaactgttgatttcatgagaagaaattgctctcttttaaacgaaagtaaatactctttagggcatccccagataggaaatgaagatgaaggaagctgttcccaagttggccaaatctggcaattattctctcaaagacagcaatgtgtcacagcaaaatgcgacaattccctcaagtgaccagtgggactgatttatgagcaaaagcaaagacattgttcccccaaacgacttttgagttactaactccctgagagggaagatcatggaaggagggggacccaggaggctcaggggtccagaccagctctgagaaggacctgtctttcacctttcctcaaggttctgttattttgaatggcagatcaccatcactttcaaggcctggccttgttctctgattggtcattcttagagagagataggttgcccattaagacccattgttctgactctgaaatgaaagaaaatgaagcaattaacatcttggcagtgggcagaattaatcatgcttgaccatttttatttaagttctcccccaaaatgcagcaccgaagggcacttattagttcacacaaagaggcatctctgaacagcaaacactcaattatttcgatgtttactgttgagaaaactgcaaaagaaaatatgcattcaacagacacattctgaaaggtctttaaaaatgaggctattttcacagtttctaaggcatatcctataattttgttttttaatcattgcaacctactggattcaatattagattcttatttctacctctccaaaccctcatcatagtcttctggccattcagcaaaatacattactttgcaaagctgaatgtaagcatagacatcttacattcagctttgcaatgtcttacctccactgtcacaaaattaggtagcacctcagatcaggtgaaggaaaaatgacacatcggatttgtagactgtcttcctctctcccatgaccacagtggtcaagtggttgcattgattacctgattaatggcctccttgtattcctgtcccactggactcttggctcgctcagccagggggctttctttggccaatggatgttagcaaatgtgacccaagccaagttctgaaaagatattcactctctttgacctctgccaccaccgagagaacatactcagggttgcttgacagaaaaataatctaaaagatatctagaggagaacggactggcctccagagccaccctggaccagcagcccccaaccagcatgcagctgattgcagcacagcgagccaccccagtagaggcagctgagcctggctcagatcagcagaactgcccagccaatccaaaactcaaagaaaaatagtgaatggtagttctttcaagccattcagtgttggggtaatttgttatgtggcactatagaggcaataggtagctgatacaaacctaaccccagctgccattcattaagcacatgttatgtgtcagggatggcgccttgtaaagttgacactttacagactcaactctgatctgcccagtgatgccaccagtcaggtgtcattattctcatttatatagataaggacacatgccttacacagtagagtttagtaagcatgtgagaagctatgtttggacccacagcagtcccctcttccctcaagttacctgcctccaccatgacagtttgccctgaatccctggctctggtgccccaccctgagcataaacaggtcatcatgtgaataccaacaaactcatgttgaccaggaaggactaagccatgcctctgaactgctgacacgtcatgtgacctgttctggaaatgctatatgggcatgagcaaagcccaccttgaatgtctaaaaataaacatgagccaggagttcctatctgcagccactcatcagcattttatcctcccagctcacccactcatcacactgtaaaatgggattgctccgaacaaacccatacaaggcagatgtccagcccaccactcatgcccaatgatgggggaagcgacggtcactctcccacagcaggcctctccctgagatcaccctgttctggcataaatagagtgtacctgtgatggaccaaattcatccagctctcgttctggatgtcctcctagcagaagctggctactcttagctgaattctgctttgttccctaataggcactggcctggatgccatgaaagggccaggagcttgccagtcctcctcactgtatctgcagctttaagcatgataagaaatacaacaagtgtttgtagacaatgaatggtctaaatgtacatatggggagttctacgagcaatgcatcacaattccagcacacacttatttgcatctattaatgtttcttgactttggttgcacactagaatcatctgagctgttctgaaaagcacaaacacacagcccccatcctggagcaacaaaacatcctgggctatttgaaggattcctgagtagagctattgcttgaattctctctgggtcaatctgatgtgcagcgagggttgacggctacccttctctcctatttcaatttaaacacagaattttagccaactcctttctaaccctcatgatgtgatgtcatctctccagggagatcttgcatagtgttcccaggagaaggcccagcaaaacttgcggcaagaggaagtaaaaatcctgcccccaccccttctatacatgcctgcaggtggcttcacaaacttgttttccctgcagctgcttgcacatgtaacagcttccaggataaccaatgagctggaaccagtaagatgtggctggggaagggggcttctcatctgtcagctggggagcctcatggggccttacatggactcagcttcttaccagttccagaagagcacccaaacggccctgggattttcaactctgaagcataaggtgggaacccggcagcaggctggaccctctggcccccctccctgttgtcctccatgagctcccagtcccgttcatatcagagcaaaaccacagctggtgggacttagcggattttgacagcatgttgattatgaatattgtccctttcaggcaagttaatgaagcacccaattcacaccagcttttatctgtcagagaaacaccagcaagcaaggtagagacaacaagccaaaccctgatgtgcaagtatgaacttcatgttaattaggaatcggaagaatgtgtgggtttctctaatgcactcatcatacgaagccagctgattcaaatgctctcaacctgagcttcgggtcatttgtgttagctgtaaggccatctgaggcagatgcattgaacctgaccttgagagtatccttgaccactggaccaagaggccagagactctacaagtgtgctcaggccagatggctaactcaactagtgcctggcaggaagactcaagatgccagcttctcccctaaaccatgtgaacattcaaccattttaaactataaaaacagcaatttcaaccaaaacactggacctttgcctattttactggaagtttctctcttagagtatgatgaaaagaggattggttgtaagagacctggctgcaaggctcacctccactaagtagccatagacattttggccactaatgtgctgtgagtcaccttattcctctggtccacagcttcttcatctgggaaaggaagacattggattgtaaagtaagaatagcccacattttttagcatttgcaatatgctaggcaatgtgctaattgcttgattattaaagagacaattaacattgaaaagtagttattaacgcttcaacaccccagcaggtggagatcgtcattaatcccatttatcagattgggtcattgagctcaggatggtgcatgtgctgcgtctgaaaggctggggtctggtgctcgcttctgggctgttgatgactgggttcagatgcatcattgtgcatgcctttcttagcagaggatttcttcccgctctgctatggacaatttactgctttacagtcttttcaccagagaccactcactggcagtggcatttgtagaaagtagcctctaagctgcaaagccctgcctgtcaccagacctacgtagagggattcccacttgctttatgatgtccagagtgctcctcgtgttgccctgtgggttttattttcctgttttccactggatatggtcaactggcatttaccatgaattcccagctcctccacaagttcttcttgtactgctaagactgaaaacttaaacaatacattttctacaatctcttatgtggtgagcagatagaaacgtggtccccagtgatccccaccccctggtattcatgcccctgtggaatcctgcacccctgtcagtgtgaggtgagctagtgacatgttctagccaataggatgatgggatgacatgtgtaattaaggggataagatgtcacttccttgattagcttacaagagattgtaacctccatcttgccagcagactctctggccatctcagcttccaggatgtaagccctcacattgcagaggtccctgtggtaaggaactggagtggagggtggctctgcacaacagccagcaaggaactgaggcttctgtcacccctggagcaactgagctcaccaacaacccgagtgagcttggaagcagagttttccccagttgggctttcagatgagaccccagccccaactaaggcaccatgatggtagccacaggagacatgggacacagccaagcccacctggatccctgatccacagaaattgtaagacgataaatgtgtaccaagtttgctgtaatctgttaggcagtaacaggtcacaaacacaccttcacccacagatgagattgagttctgtcaagcagaaagacacttcccagggggatatggaagaaatgaggccatctcctggcttcccatggctgattctgccagcaccagcacctgtgtcaggccaccagctgagcaggtgtggagatgacattacagcctccatagctgcatgatgctgtctgggtgtcctcatagttacaatggtggcagcagattcctgagccccattgcccaaccaagagacgtccgttttcatgtattgttgggatcgatagttccatggcagtctcctgattcctcactttcctgatggtggaagagatggcagctgcctggcaggtcattctgcagtgcacactcactctgcaaggtggcacatctctgcatctccagagtccacttctccttcatctggtaatttcatgagcacctgattccctgtattcagccactttcacctcaagtagtttctgtttcctgcacagagccctgatggatccacctggtatcttgattgtttcctagaaagtgaagaaagtccttcaattttctcaccacatacctgagtgctttttctcagtgagaattcaagagactttgaatcttggccaaacacaaattagacaacataatcctacctcaaatacatatggggctctatcatttaccaagctgcagaactcctttcttttacaccccacacaactttctgaagtaggtgtgcttcctaccctccccattttatagatgagaaaactgtggctcagaagcagaacatgtgctgaccagctgggaatgacatagccaggacttcacccagattttacactagctttaatgctttcttcctgccgtatgatggcagttcctgtgatttattattcttgtgacttcaccagtgatgccatgcttaaaccctccagcttctacaaacatgaaccacaaggtggaaatggccactcagtttgactttttggacattattttctcaatcccattcccaggatgcttgcttgactgctgtgtgagaaccagctcatccatctgtgtttgttttgttttgtttttgaggcagggtctcactctgttgcccaggctggagggcagtggtgcaatcatggctcgctgcagccaaaacctcttgggctcaagcaattctcccacttcagcctcctgagtagctggaactacagaagcatgccaccacccatggttaatttttgtatttttttgtagaggtggagtttcaccatgttgcccaggctggttgtgacctcctaggctcaagcaatctgcccacctcagccttgcaaagtgctgagattaaaggcgtgagccaccatgcctggccccatcctcttattaatttacaaatacacaagtgggtgctagcaacaagatcagggtactgtccaaatccttctctcaccagggtgaacagatttggaggcacctgcactgcccagctcatcttctccctttgcacacagatggcatcctctaacgtagccccatgtccatggagctgtgctcattcagatgaagttcctttcctgaatttgtgtgtcccaactgctgcttttctctaattttcccagtgtatttgtctgttctcactctgctaataaagacatacctgagactgggtcatttataaaggaaagaggtttaattgacacagttccacatggctgaagaggcctcacaatcagacctgaaggcgaatgaggagcaaagtcacatcatacatggtggcaggcaagggagctggtgcagagggactcccctttatcaaatcatgagatctcatgagactcactcagcatcataagaacagcatgagaaagacccacccccatgattctgttacttcccaccaggtccctcccatgacacgtgggaattatgggagctacaattcaaaatgagatttgggtggggacacagccaaaccatatcacccagtctcctgtcagctacgggcagccccatccaagctgaagatacagctgtaaacagaacattttggagctcctcaagtaatctgaccagcaccaagaaggcttcctaatgtccttgagatccgtttcaacacttcaaacattctcacttcagtaaagagttccttcctagtccgtgtgttcaagagaccagaattaagagcaatgggcaggctgagcatggtggctcacatctgcaatcctagtactttgcagggctgatgtaggaagatcacttgagcccaagagtttgagatccagtctcaacaaaaaaatttaaaaattagctgagcagggtggtgcatgcctgaaatcctagctacttgggaagctgaggcagcaggattgcttgagtctgaaaggtcaaggttacaatgaattatgattgtgccactggactccagcctcgacaacagggtgaaatcttatctcaaaaaataaaaatgagcaatgagtggaaatgtctgggagacagatatgggggtgggggaaatgcccgattattcaagctcgctggagagctccttctctaaaattaatagggcccgatctccagggaagaccaggcagagcctggacaccatggaacaattcagaaggaaatagcattgtctttgcaggaagcagcatcttagccagtgacgttccaggaatcccgataagtctctccttctcaacacgtaggatcacctttcagcacgttcacatgaccactgggtggggaatattctctaaagtaattgtctttgtctctgacctcattccatggttgagatagacaggccaagtgcctgaagccatggtccctggaccattttacctttcagccgatctgcgacaggaggcaggtggaccaggagacatctgtttcttgtgtttcttgcaaccaggcaaacagtaaattgcaaagacgggaaagaggttcatctttaaagtaaaaggcaatatgcttccttgactatattgtgaacatttcgtatgctagtgggatgtaattgggtttcctaaacaccttaccatctgattcagactcgggaggactttaaatagacttgaaataaaaatttccaattgtctcttggagcccaagcccagaagcctaattacctgctgaaactaattgatcccatctgagcctcctgctggaactccccacaaagggcatgaaaatgagatgggtcaggaaagttgcaggccagaaccaggagccgggaaaagcaagacgtgctcacagaagccatgcacgggaaagagcttattaagtaacttctctttgagctgctcctcactgagccagccagagagacagaagcctgcttcctctgaaggtgcctggaatgactcgcaaatttcattgaaagtggcaggagggaagcaggctctggataaaatgatgaatgcacacaaactttaatctcaatcaaggcgctctacaaggggaccatggtgacaacactcagagaagctgacaccaaggagaacaacgcccaactttagaatgggagcccacctcacctcctcccctgggctgctgcagagaagttttgtcagaaggcccacatctgcacctgagtgttggcagcatccgagggtcacagtctgtatccccagggaacatgttgaattgtagcagtttttcttagcacctgcgccagctcaccactccacttccctgcttctcttttgggctccagtctcctggaaacccctctctgtgtgtgaaggagctgcagaagaagaaatgggtcctcctgcagaatgagctcccaaacacagcaccgaggcttttcattcttcacaccccatttccaatggtcagcagatgtggtcagcactaccagatcaagactctgaacccttctcccattccactttcccacccggaggcaggccaccatcatactcgaccaaggcaatggctaccagggatgctgtgatactcccataatcctgacgagtcaaccactatggccttaatggctctgtcttccattggctccatctatctgtcatctgtttgtctatctaaatattttatatgtatgcagaatgacaacagtccttaagatattttacatacacacatatgaacacacatatatgcatatttgtatgtagatagaaatagatatagatatagatatagatatatatgtgcctatatacattttttaacagttgtgttggtaaaaagacaaacacaatccaggcaggattgtattcctttgcttcttctttgttttttttttttttttttttgagacaggatcttgatctgttgcccaggctggagtacaacgttgtgatcatggttcactgcagcttcatcctcctgggctcaagcagtcctttgacctcagcctcctgagtagctgggactacaggtatgcaccaccacacctagctatttattttttattattttttgaggagatgggatcttgctatgttgtccaggctggtctcaaactcctgagcttaagcaatcctcctgccttggcctcccaaagtattgggcataagccaactctcccagcccttttgctttttctgattttaaaggaaattaaaatggcccctgaaatccagtggggtctggacactgagcctaatagaaaatgtgctcaaaccacagaggccgccccccaagcctcctgcctccaccatgaagccccacactgctggttctctgttcaaagcctgtgtggtcctttgggaggacaagtccttgtctcaagcatgttattcctctgctctaagtaagcctgaccgtggcttccatggtgctcagaattgaatcccggtgcctgacctgacccaggccatgctggctctcatgttccggtagctggatccaattgggccacacgtgcctctttgctgcttcccaagcacattgtccattctctcgctccagggcctttgcacttgctgctctctccaatttgcagggaggctccctcatccccctgtagtcaggcatctgctcagaaaccaccacatcagaggaacttctcctgagcactgacctggtagcatactgctcaccaccacccaacccttactccgctgcatctcttcaggacactttttaccactttgttcattgagtgtctatttcctctgacctgagttcaagtaaagattcgatctctgtacccaggtgcctagaatcctgcctggtacatcaaggcaatctccaatactactagttggctccatggttaagtaaatgactgcacacccctagtgctacgtgagatgaatttaggtgataaaatggataaatgttttcattacacgaattaattttaatttgtacaaggaaaaaatatatacttatatataactctttgataaggcaatgaccaggatcaagttcccctttgaaggcctgggtgctgaaacaacaagtaatgattttacatttctgtggaaggggaattaacaaatagagcacgcccacctgcaccaggctcacaaaaagggatgccacagggcaacacagagctgagcaaggagcttctgcaaacctccacaagagggtccggctccatctaaactgcagccccaggtggcttgctgcatcctgcagtgttgctttaactcgaggggttcactgatgattggacctttcatcatctcatttctcctcagggaagacaataaaacgggcaacacacgttcctccctttgtagcagccccggagaggcctcataaactttctgggcctattctcccttttaaaaggcacccaaaccactccagcaattgacaaaagaattttcctgggcaggagtggaagtcagcatggggaaccagctgcgtcctcatggttcagcgttatctgggggcagtgagccacgaccaggacattagagccagcccccactggccccctctctacagagcctgcaagttctgctgtgtgtttcccttaaaagaaacagatagggcctagagaagagagacttctgactttgacaacggcctacatcaattatgaattttctatttgcgggcaaattatattggtcctccattttttaaaaattgaggagtaccttatgtgagaataaagtgcataaatcttaggagatgaatgaggccctcattacacacccatgtaaccacctcccacggagacacagaaggctcccacctgcacctgcagtcacggccctgggaggaagccactgttttgacttctgtcagcatggactgtgctcctcgctcttgggcttcatggaaatggaaccgcacagcacccacctttacacagctggcttctgttgctggaggtcccgtctgctaggcatttccatgtggccgtaggcttcaaaatgcattcttttttattcttgtgtagctttctttctttctttttttaattatactttaagttctggggtacatgtgcacaacgtggaggtttgttacataggtatacatgtgccatgttggtttgctgcacccatgaactcatcatttacattaggtatttctcctaatgctatctctccccaagcccccaaccacccatagctttcttaactagttcacattgatatgtatgagtttggggaaagtcaattgatgttgttgttgttgttgtttacatggagttggcagtggcttatgggcccaagacaagtaactcaagtccaaggaaaaatttgctccagaagaaggtagctaatggctaagaatcaaacccataaagtccctagatcagggcagaatttccaacctaaaggaattatgactgtgaaaatcatataaagcagtccacagaggcctagaacgaaggcaggtactgaaaaggaggtaggtctcacttaccaagacctcaaagggaggagatggtcaagttagagcccggggcagagataaagataaggaggtgctgatgagaatcttaccaatctacattccttgcaccataaaggcgattttgctgagttcaagcccctcttatggtcaatgcattattgggtgtggactggattttgggacccgccatcttgaaatgccaccgtagagtcccacagcaggattcctcttgcttctggtggccaagactgaagtgaacacaactttccagataaagagaagacacctttgtgtgcagtccctttgcagcaaaataaagtcagatccactacgtgctgttctctggcatgagaggacgtacctgtttatttatttattttcagctttgtgatcttccctgaaccgaacatcacctcctggccctcgcaggccagagcagctgacatcacaccattttcggggctggcataacggcggcttcctctggatgaaaagtctccatgtcagtcactcttgaatgcttacctctcaagacccgcttgttgcttggtaacaattttcacggctgcattaaaaggacagttctgaaaagaggatgcttaaaacctgacagcaattacagagaaggcagaccacttctttcatttcagaaaccaatacacaagtggatcttcccattcagttagtattttattattatttaaatgagcttcccactctacatgaagcccagctttttgtcagcactagtttcacacccctcgtctctgagcctcttcagagaaggaattgcagccatttctggggagagaagcttcttccaggtgacttttgagttccttttggcttcagagtttgtggtgaacaggggaggtggtaattctacaaccagagcacagcctgagaggaagagctctcccatgcccacctccttcctgcaagaggccacccccaacagccatctctcctttaccattgtggctaaaaacaggcaaacactaaactgcccattaactgagtcatgcatgaatgttctgggctaaactgtgagttccttaagggcaacaacaatatatggattatttgtttctccagagaatccagtaaagtccgagcccatagagagttttcagtacaccatttgcctatttcatggccagcaagctcttctacataatggtagttcatataacttggttaatttcaacccataaaataggatgttttgaccacatactcaagcttgcagaaagatcagagcatgcccagtttgatatgaaagaattgcccaccctctctccagtctcatttcttactcaattaaactgagctcaataagactatggcagaatcctgtgaaagccaactacatgcccgctaaaagcatccagaagtaccgagcttactcaggaggctctctccccagtttctcaacctcagcatttgtaacactttggatcagatgattccctgttgtggggtctctcctgtgtattacaaggtgttcagcagcattcctggcctctaccccactagatgccagtagcacccactcagctgtgataaccaaggatgtctccagatactgtcacatgccctggaggagagggaacaacaacatcacctgtagctgagaaccatcaatctagctcaaatgttaacctatacaggggttttaagcaactgtcactcagaaatgtccatctccatcagtctgtccatcactcagttttgttttctccataggctttatcacagtctgaactattttaatttattttgcacttatcaccgatctcccactagaataggctcttacaacaacaaggacctcatctgtcttaatcatcaccatacccacagcaccaaaagcagctcctggtacataataggtgcttggtaaatatttgttaagtaataagtatattttcaatgcagtgctccttgatctaagaggtgatgttttatctaaccagtaactgactgtaaggtgcttctacatggcctagtggtacacagtaagcatcaatagtattacacatgattgtaatgatagtcggagtcagacttgagaacagtccagcttcttctaggaattagttaggctcaacttccaggcctggccacatcagagtgacaggtattgggcttaccctccatccagcttcacctgttttcaggctttaaataatcctgagagaagagaaacaaacaaagtgaggtccacatggacccaggcactccctccaagaggactttccaaaatgtcacacaaggagttagagctgagtggagagcaatggtctcactgtggggaggaaacagaaatcagaaccgggactgccgagttgactggaatttgtgtgtacacaaatgggagaaagagatagctgtgcagagaagcagcttcagatatctacatagatcccattgactacatggctgaatattaagctgcaagtgcccacagaaagattctgcaaggatgggcagagaacagatcctggaagctgtgggctgaacagatattagcgatttcagaggatgcttgggactaggggaacttgcagtcctgaacagtcagtgcagagacactgactgggcatccctgacagtcatttgatacccggactggcaaggtcttaagaagagaagtactctattcctagacccatcctaacaaagcctaaaagcacggtccaacagcatagaactcatctgccagtaagttaactgcttgccagagaaaggctcaccactcttaaaaggaagaccacataatctagattcactgtgatagatcattcatactgtccagcatacaataaaaatcactagacacataaagaacagaaaaaaatgtggcccactaaaagatgatgcaatgttttaattaacagaagagggttttaaggcagacattataaatatgtttaagtatttaaactaaaagatggacataatgagcatgcagatggggaatctcaggggagaaatggaaactaaaaagaaaaatttggtaattttataatggaaaaataaaatatctgaaatgaaaattttactggatgtacttagcagcagaacaagaactagagaaggaaaataatcagtgatttttaagcctgagaaattaaaactatgcaaaataaagcagggagtggaaagagagagagaaaagattgaaaacaaatggaaattaatgacttgtgggacaataccaaatgatctaacatggatgtaattggaataccaaaaaggagatgagggaatttgatcaggaaaaaaatacataaagaaaagatgggcatttccaaacttgtggaaaagtaacaggctgtaaaaccaagaatattcatgaaccctaagcagaataaacacatacacaacacccacctagacataccagacctatcagagtcagactgttgaaaatcaaagataaagaggcagtgttggaagtggccagaaaaaataaaaacaaaaagatgcctcccaacctttttggctccaggaactggttttgcagaagacaatttttccatgaactgggtggtggggaggatggtttggggatgattcaagcacatcatatttattgtgcactttatttctattgttattacattgtaacatataatgaaataattatacaccgcaccatcatgtggagtcagtgggagccctgagcttgttttcctgcaactagacagtcccatctgggggtgatgggagacagtgacacccaaagtgtgttgcttatgtccagtctattctgtaatctcattttggtggctgtcactgcagaaaactgcttcacaaagataggatgttggaaatggaaacaggcttttcagtgattttgtggcaatctcaggatattctgccttgactttaatccagaatgtatggtgatgtgaagttgtctcaaacatacttttaggctcaccagatgcagctgtacaactgaagtatatcagctcacttgccacgatagagcgtgccaccagacacagcttaatgttcacctgccactcactgatagggttctgatatgagtctgcaagcagttgatttactatggtctctgcagtcaaacctcccggctaatgttaatctgtatttgcagccactccccaccactagcatcactgcctcagctcagcctcagataatcatgcattagattctcataaagagcacacaacccagatccctcaaatgtgcagctcacaatagggtttgcactcctataagaatctaatgccaccactgatctgagaggaggcacagctcaggtggtaatgctcactcaccctctatgcctgctcattcctaacagcaaagcaagggggtgtcagactggactgaaaagcaaacccaaccctgctgtatatcagagaagcactttaaagacacagataggttaaaactaaaaagacaaaaaaagacataccatgcaaacactaaccataggaaaataatatttaattctctaagtttctctgttatgttgttttgctgctgcatttttgttttatcattaaagtaaatctctatattaatttcaaatttgaaaaatgacctgtatagtatatatcaccctacatgaaactctatagatacatccaaaaccctacgaagttgttctgtaagtttctgataaatgaagccgcaatgaaattgactgaaaggatctttgtgtgatgtccagcctcccccacatctttgccatcacttggtaatgtcagactttcttttttctttttttttttttttttgcaggtctgattatggaaattatgtttcatgttgtttactttaaagttccctaaatatcagtgtttttctatttgtttactgatctttgaaagttcatcagatgattctggcatctctctgtccttcatccccaccccctacctcactagaaaagatccatttgacacctggggccaatctgtctagctatggctttggttcttatctccagtgacagcatagttgaagatggtaagataatcttcactgatgtatgttttacatattaatgcttgtgtttggtgccagggtaatttacaaagatgcaagtctggaaattgagcaagtccattaccaccagctgctttacttaatggtctagcctctgtgttaggccatcttttgcattaatataaataaatatctgaagctggtaatttataaagaaaagaggtttgattcgctcatgaatctgcaggctgaacaagcatgacaccaacatttgctggacttctggagaggcttcaggaagcttacaatcatggcagaaggcaaagcaggagctggagtattacatggcaagagtggaaacaagggggcagtctcaagcttttgaacaaccagatcttacaagacctgagtgagaactcactcatcaccaagaggatgctgctaagccattcatgagggatccacccccatgatccaaacacctcccatcaggccccacttccaacacaggggactccacttcaacaggagatttggaggggacaaacgtccaaccatatcatctgttcttttacccagcaaaaagcaaaataacaacccaaccaagcgaagttttttaaaataaaaaaagaggaaaagaagagagatgaaagaaagaagaaagaaagaaagaaagaaagaaagaaagaaagaaagaaagaaagaaagaaaggaaggaaggagggagggagggaaggaaggaaggaaggaagaaagaaagaaagaaagaaagaaagaaagaaagaaagaaagaaagaaagaaagagaaagaaagaagaagaagaaagagagagaaagaaagagaggaaggaaggaaggagggagagaaaggaaagaaaggatgggaaaggcaagaggtaaatctctctctccttggggaggtcccacagtgcttgtccaacacttagcaaggctgacttccctctcacatcctgaaatgccttcaccctggagaaacagagggacatccccatttatgtacactttgttgaacatggaaagaaggttaaacctttcttctttctttccttttttttccattccctccatctcctgcaggctccaaacaattctcttcccccctcacccccagcactattaaggtataattgctaaatgaagattatatatatttacagtatactacattgcataatgttttaacacatgtatacattgtaaaacaattacatcaagctaattaacatagccacttaccattttttttgtggtgagaacatttaagatcaactgtcttgcaatttccaggtataggattcattatgattgactacagtcaccgcgcttacaatagctctccagaacatatccaccctgtccaacaattttttttcattgctataaggaaatatctgaagctaggtaatttataaagaaaagagatttgattggctcatgattctgcaggatgaacaagcatgacaccaacatctgctggacttctggagaggcttcaggatgcttctctatgcagctgaaggtgctacctcagatgtgcagcttgtctggcttcctggtcttcccctccctgggggaccaactgaccccaaacttagccagcaaccaagtcatcaggagggcttcctgacacacaggcgctggcctcatcctacagtttctaatttaccaggtctgagaatttgcatttctaagaaatttcctggcaatgctggaccctgaagcacatcagatgctggctccacttctggggagaccatgtttaaaccaaggtaaaggaggcagcaagaaaggctgagcagtgtctctatcggtagctttaccctcccaggtctggctacactgggctctcccctgtctgacagctcccacgtgtgtataatgctggaaaataattactaatagcagcaatatataatgttgattaagggttcatgcctacgaaggactaaaatgcatgggtgataatagtcatagtaatagcacaaataataataatgactcaaaccatgattttggcactgtggtggggccagcaccatactcagcatgcccctgtgagcatccctggttcatccgtgtcttgcccctgggtggcagcctcccatttatcagagcttaatgcctaccaccccctcttgaaaatatgcttctttttgttcattatcaatatcctcatacctacccagtgtctggcacaaattttgtattcaataaatatttgttaaaagataaaaaggaggctcagagagtcgaaataactcgccaaaaagaccatgctgctgataacactcagagatgaaattcagctccagggttatctgaccacagagtccgagcactccagccaggggctggaggaaggagaatcccacgtgaggatggggagcctctgatgcaacccctggtcccaggctgggtgccctgacgtgagatcccagcctggaggggtggatatcagcctccctgccttacgtttggctgcactggggttaaatcaccacccaggtcaagccctttgcaagaggaataggcatgactctgtggttcccaggttagtcttctcagccactgcctcctggtcctcaggtataagagcccttggtgggcacctttgcatttaaccttatcaagggtctgtgaattttgcagttaaatccattttcacagactcagaggaagaaactgcctgcctggagtcacacagctagtgcctggaggcaggccttttgaacccaaggcctcgcttggtgccagagcctctcccaccaactcagcactgcctcggggtgctgcgttcagaggtagcagcttcatcagaagcaggcagcacagtcgcggcgggcacccaggcaaaagcaagcccagcctcccctcatcccacctcgttgccctcttgtgtcttacgccccacaaaatttcacttattccactaagtatccagaattttcagccagcaaagaaaaggaagaagaaacaggctgcacagagcagcgaaggcgtgtctggagcgctgcccaaactgactccttccatcactcccggcacaaaggagccggcacgtctggccttcacggacgcctccctgtccttgctcgctccaatttcttggctgactgaaagaaaaggagacccctgatctaatgaaatgttccagcaagaggataaattaacttcctctccgagttgtccaagctatttactgtaaaccatgcagtcaaatgaaactgacttcagcagctcagcagggtcttacagcctccagtatctggaaggaagtcctggaaggacggatggccccaaaacgcttctccctggtgctttccactcttcttcttttcggattttgaaaggaaaacgtctcttttggaaatcagtaatactaatcaaaatataaggattcctgtttttaacatttaaattgctccaaacttccttgtccaaactgctaaagcagcatccagttattgaacagtgctttctagaactactgaaaaacaggggtgagcacaggttatcttgagaaagccgcatagagacagggctgggctgcaggggagcaggagaggccttcactcaggggtccagcaggtgctggtgggcctggcacagcggcacccccttccctgcacccgtggaaaggttccgcaggaggagctgtggagtgatcggggtgatgaactcagcatgaggctgtgggttggtggccatgagggtgattcacaggtgcagagcaggttctcagacgttggtacatgtacagattgtgcaagacaataggacaccagacagatccccgggctccacagcagaagtctggttactgggcaggcaggccccaaacactgtatttaaaacaaaaccccactgacaagtcctgtgactggagagaccccgagtgaaggcagacctccatgtcctctacatcctgtgccacatctggagagacccctgtgagggcagagagctacctcctcttcttcctgtgtcacacctggagagaccccgagtgagggcggatggccacgtcttctacttcctgtgtcacacctggagagaccccgagtgagggcagatggccacatcctctacttcctgtgtcacacctggggagaccctgagtgagggcagacagccatgtcctctacgtcctgtgccacatccggagagaccccaagagagggcagacagccacctcctctacttcctgtgtcacacctggagagaccccgagtgagggcggatggccacgtcttctacttcctgtgtcacacctggagagaccccgagtgagggcagatggccacatcctctacttcctgtgtcacacctggggagaccctgagtgagggcagacagccatgtcctctacgtcctgtgccacatccggagagaccccaagagagggcagacagccacctcctctacttcctgtgtcacacctggagagactccaagtgaggagagacggccacatcttctacttcctgtgtcacacctggagagacctcgagtgagggcagatggccacatcctctaattcctgtgtcacacctggagagaccccaagtgagggcagactgccacctcctctacttcctgtgtcacacctagagagaccccgagtgaggacagccagccatgtcctctacttcctgtgccacatccggagagatcccgagtgagggcagacagccatgtcctctacttcctgtgtcacacctggagagaccccgagtgagggcagacggccacatcctctaattcctgtgtcacacctggagagaccccgagtgagggcagacggccacctcctctacttcctgtgtcacacctggagagaccccgagtgagggcagacggccacatcctctaattcctgtgtcatgcctggagagaccccgagtgagggcatatggccacatcctctaattcctatgtcacacctggagagaccccgagtgagggtggatggccacatcctctaattcctgtgtcatacctggagagaccccgagtgagggcagatggccacctcctctacttcctgtgtcacacctggagagaccccgagtgagggcagatggccacctcctctacttcctgtgtcacacctggagagaccccaagtgagggcagacagccatgtcctctacgtcctgtgccacatccggagagaccccgatgagggcagacagctaccccctctacttcctgtgtcacacctgcagagaccccaagtgagggcagatggccacctcttctacttcctgtgtcacacctggagaggccccgagtgagggcagacggccacctcctctacttcctgtgtcacacctggagagaccccgagtgagggcagacggccacatcctctatttcctgtgtcacacctggagagaccccgagtgagggcagacggccacatcctctaattcctgtgtcacacatggagagaccccgagtgagggcagaaggccacatcctctacttcctgtgtcacacctagagagaccccgagtgagggcggatggccacatcctctaattcctgtgtcacacctggggagaccccgagtgagggcagatggccacatcctctaattcctgtgtcacacctggagacacacagagtaaaggtggacagccacctcctctacgtcctgtgccacacctggagacaccctgagttaaggcagatggccacctcctctaattatttttaagaacttttttggggtataatttacatgccagaaagttcacccatttcaagcatatgattcaatattaaagcttaaaaatgttatcaatttaataacattgatggttacagagctgtgtaatcatcaacctaatccaatattagagcattttcatcacctccagaaagatttctggtgcctgatgcagtcattttcttttagactcccagctccaggcctctcctcacaaatcctcgcagccaacacgttagtatccatgtgtccattgttggtataagagagaattacacctgtttttttatgctcagcaaagaattgctgccattttaaaaacaaggaagaatagtgcacctgcttttctcccgtgtttatcttacccatacgcaagaagaagccacatgccttggtgtggtttaaggcaagggcctccctgccgtttcctttcccgttctttccaatgccattcaccatcccaaggcaggtggaggttttgtgaacctggtagagatgaactttgaggcctctcacctgcatgggcttcctccaggccctaggaagaaccctagcaatatgttcatatggtcaaacacttttgtaaaaattgcaaaaataagctattttgagtggtgttggttaagagtgttctgcatttgcactgagactcagcttccagttcagtgaggacagccgggctagtgtagatgcggcttccaggagtgtttctgctccccttccccacatcaatcactcaacatttacacaatatggcaaaagctgaagttctggtgtgatataaatgactactctggtgctagactccagaagaatatggagagtggaggggagacacggcagcaggagccagtctgtggaaaatccttccaaatcatttcatttgtatgaagaaaacttgaaaaaagatctcccaaatttgaaaagtattcaaagtttgcctatgacattagtaaaaacactttgtgatataaaaggaaaccttttaattgttaatagaaaatcaaactttgatcaatgatgatggattaaagactgaatcacccttcagcaaatcattctgcttcttcagcctctaaaacgattcccttccctgataattgtgactcaaacggtgcatggaccacgaaagtgctttgtaaactgcacagcgctatggcaatggtgtcattatgatcttcatcgctactatcgacaacctggaataaaactctttaacttccagttgctgcaacacttaatcacccagttgaccatggaaattactcagctcggcatgaggtgcagatatagctgcaagtggaagctgtttttaaataaaatcttattaattaaggaagttctggttgttgtttatttgcatttttttaagcatctaggaagtccccttcctggttatggtctgctaaacctgtttctccctgaaattgtgttcgttatctaacattcttcaggttccatctgatcacagtcttcagccgtagatgtctctttcctccattcccccagctgagtttccaagcacagaaaggaggagcaaatacacctgagtttggggccctcttccctcagttctgtatccattttccctgagctggacagacttcaaataccatctttctgccgcagttttatctgtcaagccatcgttctacgtggtattactcttttctatttcagagaattaattctctgaaattgccagaaataacctcacacctcacagcagttacccctacccattagcgggaaatggctgtggtctctctctttggaattattgtactgcgaggtcaaggatggcaagtgcagtggaagccatctgctttagcaccattagtgcactttgtagataattatgtaatttttcaagcattcctggggattcacttcagctgcccagtcttatgagtgaattttgacaatagaaaattgtggttgatttcagtttgtttgggtaccgttcccatagtaataagaataattattaataaatggagaaagttgtgctaagggtttcagtcaataaataaccttaattttttttctttaaaaaaatgcttgcaacaaagatctaaagcagaaagaagcagggacatctcatagtctcttttctttttgggcttatcttggaggtgagatactattctcaatttaattaaagtcatgaggaataaccggctgcaggactatatttctagcagggatcccaaatgtcagggagcttgtgaatttctctaacaagagaaggataaaggtcacctacgtgttttaaagacaagtactcacctttcccccacccaccctcatcagcttgtaagtcgtgaaaggcttagcacatcatacgtagttggaaaaaaaaagaaaagagtacaaacagcacatttgcatgattggccactgtttctccagtattcaaaccatcaggcactcgtgggcccccagaagccagcaagtgtccttgtattttctgggtggctgcatagtgaactggcatcatgccctctgcctccacacatgttcgtggaaacctggccctgtgctgggcagcaggctacagattggggatatagcatcctacacagccaacaatgcccatctggggcctcatggagcttgccctgccagtgaggtttggagtgggaacttcaacagcatggtaaaggtccctggattaattccagctcccccagaagcagaattcaaggcttcaagttgttaatttgggagggaatcccaggaaactgcagcagtggagtgcaggggtgagatagggaaggaaagatagacaatggagcgtatgttattcagccagctacacctgtggggtactagagtgagcccctggggcaactcccggagccactgcagacatgcatgcagagctggtgtgcctgaggggagagagagctggggtatttaaacacccactcccaagagtgattgatggacagctgctcctggtcaccattaatcctctggtgtttctgaccctctgggcacggagcagggtgggggctgtgcagagggctgtgtagccagagaaaaccctgggcagagagatgcagaagccccgacagagggaagtctgcaggcacagcccccacacccatggcgggcaccagggtgaaggaggagctaagggagccacaggcaccccaggaaggcttcttagtgaagggaagggaaatgagatagccacatggagcctggaaagatgggaagagttcttcccccaggaggatctagggaggaatgctccatttgcagggccccagagggaatttaaggaagagtgatttcagggccctgacaggagtttaatctcactggggcaaaggtgagagggggtgggaagatgttgctgaaggggtgaaaccaggccagaaaatgggaaggtcctataactcgctatagccctagggaggagtgtaaaacaaaggcatgaggagatctccttctgcccactgcaggaggggccatttccccagtttccaagagggaatgcatgcctgagctggcagaaaggctggagagaggtgggtggttggaagggaagatcagtcagagtcggggcagtgccatttacagggttgggagacccagcttagaactttaaacaatggagtctcggtgcaatttgcagatgagggataagaccagccaaccaaggccactgatttggccacagagcctggaacctcctctgggagaatcacatgtgtctgccttctccccttctccctatagtcctgctctgctctgtaagaggagaagacactcaaaggtacgagaggaggctgaggtccccccttccacccttccctgagcagagccatctgacactggagccgagctgctccccctcttcctgcacatcctcagctctcaggggcagctgccagcttggtctcagacacattcacttcccagaccccaatctcatttgtaaaatgacagctggagcgcatctggcctggcaacttcattcagaacatcatgtggcttcgtttctctgtaactccacccttcactgcagaagttcaaaccaccagtgggtctgtgaatcaagtcgaaccagaccttgctatgttccttcctttctgatgcatctaccagagaatgattccaacatgctcccttgaatggctgggccaggaattggcacttatttccacgtttcatagtgataccctgaactggtctgtaggagacaaaaggggccctttgcccatcagcaaccctgtgagatgccatcagcacatttatcccaaaagccacactgcgatgttcgttttttactgggagacatagtaaaaaggcggtgacgtggtgtagggccgccagagcgtatgggtctgtaatggccgtcttcactattgcctcctgctcctgatgatgctaatgtaatagtcacccacggctgtgaacaagccgagtgagcgccattagaatgtgcttagcatgagagcaagacctctgtgatgctggcccatgtggtggacgggatcccctgcttgtaatgccaaccacagacacccacagatagagaaggagggaaagagtttggttggaggtaccagggtatctcagagagctgaagaggaaagctgaacaactgggtcccgaggacagaaacctgtgcccagctggggatctctgctgctggacgcaacggtggcccctggtttcttcactgctctgtgtggggagactccgtactcagacgtggtgagagtcaacccactgcacctcggcctcaaccatctcagcctgggcttaggtattcatcctcagtgccttgcacacgctgagcgttcagtaggtatttgtggaatgaatgctttaagaggttccaattggccaggcgtggtggctcacacctgtaatcacagcactttgggaggctgaggtgggcagatcacttgaggtcaggagtttgagactagcctggccaacatggtgaaaccccatctctactgaaagtacaaaaattagccatttgtgtggcatgcacctgtaatcccagctacttgggagactgagacaggagaatcgcttaaacctaggaggcagaggttgcagtaagccaaaatggcgccaccgcactacagcctgggcaacagagctagactccttctaaaacaaaagaaaacaaacaaaaaaaaagaggtcccaatagattgtataaatttgaggagattcctctttctccatcacggatttggttatttggtgggagggggaagaagtttcaggagaaaattgtttaaaggtcccttgttttcattcaaaatgaacaaaatggaaacttcattaagctccatagaggaaacatatacttttaaatgttggttacctatgttattgtctaaagccggatttgcaatctagggcctgctgggaaaattcagccaccctgtgcttttataaataaagttttgtgggaacacagcacaccatctctttatatctcctttcacactgcactaacacggttgaattgttgcaacaaagactgcatggccctcaaaatgggaaatatttactatctgaccctttaccaaaaaaggtctctgacccttggtctagaagaacatcaataagaccaggctgctgcattctagtctctgaattatgggacattctgggcacaactgtgagcagggtggggagaaagggcacacccatcctcttggaaccccctgaggccgaggctccaggaagatgtcccagtgcggatcaatatcaatcccagccccaagcgccccgccggagctggtgcaagcagccccacaaccgtgttgttttctccccctactctcttggaagaaatgcccacgattgagaccccagacctgggtttaaaccctgattcctccctggctacaatgagaacaactcactaaagaccctctaaacctcgagcttcctcatccgaaaagctgggtcgatggttaacatgagtctctcggacagaagctaatgttgggattaaaggtaacaatttgtgtgaagcaagcatggtgcctacctgcagaaggtgcccagagaccctcgtttcaaaccccactgtatccctaacatccatgatgtactggtaaacgtttaacaagcagatttcagtttgggatgggggaagccctgacttatagcatctgccaattgtcatgctataaatggccctaccctaccgtggctaatttcaagctgtctacgtgacattactgaaccaaggcagggaagagatgcaaaccatcaggtctcatgcgtgatgtggaccagtcccaacacatcatggtgaaagttaagattttatcaggtttcctagacattaaaaaattgccctggtgtttggttaatccccacattcgctggggtccctgatgttagctgcaacattctttcctcgatacaaggctccgccacgagggcagggggcaagctccatgcatctttctcccactgacacagacagggctcttcaccaccacagcccatgacctcctggactcaactgccattggaagtagaagttcaagatctctacccggggaggccaatacattagctggttgctggcctccttttcttgggttgaggcaatattttattttaaaagttggggtatcaaagtacacttagaatgatctcaagacatgcaacatcctcttgtctctttgatgggcacgcggtggcggagccggcaccatgcgtttagccatctgaggggtagagtcacagccatgaccatcgtgggcagcttgacagggattctctccacccctcattagaacccctgttaagggcacgcctgagccgaagaaccagctccttcctggacgctgtggcttcaatgttaaaatcccaatccggagaaggattccttccctgcttttcctggacacttttcatggctgagcgttcccgcccagggtgagcactgctgctccggccttgctgccccatcgctgtagagacttcatcgtctccatttctgggcctgacttggcttattttctgcagacttagaaaaagagggcattaagaagtcatttattccgtaagtattttacattagtctagctctgggtcagggcaagttcttgtctttgggccttttgtcccttgtttcacaagtcagccttgccggacaccagcttccccatggccactcccaggggtatcaggtcccgtttcatggggttgtggcagcagtgttttcagggaagctgagtgtgagcaactccatgtaactcattccgcaagcgaacaggctacctctgtgaatcaggaacagataatggaagagttggttttcgtttttttaaggaataataatacctggtaggatatgaattacacagttctcttttttttctctctacaatctgcattatagcatttttcatcaattcaaagcattcaaataaagatcacctagcatacctggataattatgtctatcaaggaacacatgccaccgcacagagccaggaatgcaatgctatttgttttgaagtgccaccaaggaaaaaagtatctatagaaacagtgtgcaggcattccattgccactgtgtttcctgataatgggcctattaatgaaatagcagtttgattttcaatcacagttaatgatgccttttgtgtaaccatcatccatatatactgacgtgttcgaacggcctttaccagagaaggaggcaccagacccacagaagggggcaaaaggcactggggagggacggtatctgcaggcacaattcaaagaacagcagcaacatctctcccagagcaaaaactgaaaaggtccttgactgctgctgacacatcagataaattgtacgtgttttgagaaactagggatgtttactgcctgtcctcgccactcttgcagtcatgtttaaagggggtaacgtatgcacaagtagcgagccaagtccaagcctcctgcactgcccctgtgcctgtgccccctagaccattagagtctaaatgtctgcagagaccaaggaggagcagaaagagccagcctgggccctacctccttctcggaaaacccatctgtcctgccccaagtggaggttggcttatctgtggccctggtcacaaggaaaaaagcacagatggtcaccctactcaggctgagccaatcggtgtgtccctcggtagaacatgtgattgagccataagagtcaactcctgccaatcgctcaatatgatggcagggaaagaagagaatttcgaggcagccactttggtcccatacacacagaaagtgggagagagagagggggcccagggtttctgctggagtacctgttttagctgcatcccctcatgggacacccgagtcttcctcctcttcttgggttgcatagtattgccttgggtcctcttcataaagttgccctttttcttgagtcacctgcaaacaaaggaccccaaactgagggacacacctttgtgtggtcaggtgcttcctgccaggcagccgctcctcagggagtgctggtttcatcggtgataagtcctgagcaacacaacctcgggaaatcgagcaacacttctgcccttgagctttggggtcaaaagagtcgggctcaactgtttattttatcccaccctaaatggttggttttccttgggcaggactggcagcccaggacacctccacccatcccctgcctggtgctggagtcagagcctggggcccttggagcatcctgtgcataatggatggtcagggattctactgtggctttcctggtcctctgtcctgaaatctctctgtctaatcagcagggcacaccaggaagctggaggagaaaacactaatattttgaatgatgtaggttttattttggatcacttttttcctttcacttagaaactgatggtgccattcctaaaaagtttccccaaatttttacatctctgaagaagccactattgatttggaaaccagcaacacactcactctgttgagattgtctgaaaccagagccagccttgagcccttcagaaatcctttctctctgcatcctcatttataggctaagccacagccccagccctttagccaggaccgagaccctgcttataaggtcagtatcatctgcctagcacagagttcaggccatgctttccagcacccagtccctgaggccagagggcagtcagtgttgctcatctgaagcatcactggatttacccaacaaatatggccagagacttacataaaaggatattgtgatattgtaaagtatatctttcgtcttcctcctgtttcccagcattcaactcctgaaatccttgggttctccaaagagataagtgtttttttgtgtgctgatgagatgatgggtggctgggggcccctaggtaggggcttctggtgtggggctggtcacaggaaagaccctggcaggattagagtgttgggacttgcaacgctgacctcctatcccccacctctggggcggagggggctaaaaattaagctgatcaccaatgactagtgatgtaatcagtcatgcctaagtaatgcagcctccataaaagccccaaaggacagagttaagatgagcttgcagaaagctgaacgcaccacttggaagttcctggagggccatgtaccgaagaggaaatggaagcccctcaccccttcaccacaccttgcgctattcatctcttcatcggttctttggtagtcatgtgttatcccttttaataaaccagtaaacattaagtaagtgtttctctgagttctgtgagtcactctagcaaactaatggaacccaagggggcagttgtgggaaccttgacttacagctgtggtccaaagcacaggcaaaatgatggggggcttgtgatggcatcacaagtggggaataagggctgcaatcttggagactgagccctcaacctgtggggcctgaggccatctccaggtggagaatgtcagaattgaattgctttagaagacacccagctggtggttacggcagaacgggtggctttcttggcatgaaggaaaccacaaccacccccgtgacacacacacacacatttggtcgcagaagtcttctgtgttgtttgtcaagtgagagtataggagaaactggttttttttccttataaactcagagatatgcactatatgacatggttagtcaccatgaaaaatttctaacagccagaatgctctacaatcagagaccagctggaaaaattatgccacagacacatgacgggacatgaagcaattaacaaattcactctcgaaaaatattttgagactatgggaaattctcatgaatcaaaaataaaaaaacacaagatagagaaacgtgtgaataaaaggttgtcttgactttgtgttatgcacacacacaggcttctgagtgacccaaaagtgggagggggcaccacaaggaggcacacaggggtgctgggattgcaggagatgttaattttcttctgaataatttcctgtattttccaaaatttctataaaaatacaaagttatttggtaattagaacaaacatcatatttttaaaaatataagaaatactggaaatatacttccaaaggctgtgctttccagagatttggaatgtgcttttagaggcaccatgaagagctcagacaaaacgccttctttggcccaaaggcaccaaaatcacttttaaaaatccatgtgcatgaataacaaatttcaaaatcatgtgaaacctgtgctcagtggtcattctccaaacacacgtcttccctccctgctataggtggttaccaaccccaggggtctcctcccccaggatggtgcaggggttgagatccaggtgtcaactctgcagctccctggggaaggtctgtgctgcctcgttcttcccgcctgtcttgtcaagggaagaggaagatcacagcgcagggacacactcgccatcactgtgcacccatagagtgtcctcttcccaaagggcccaccataggagccagggtcaccccccttctgccccctcatcctactgcaatccagctcgaccttcaggttcaacccaggccctggggaaccatgtctaggtagagcacctgggagggatgcaaggacatcaggtgcatgcatcgtaggcaggtggtgcacagggagctggggtaggagtgcccccatgtctgaacaccctccaaagggccatctgaagagaagagtgctgcaggggcaccgagagctcacagagtgacggacggcaccatcggccccccatcagcggtgggcacagcttccagcaggccaggtgcatcctagggctacccagcatgggatctggacacatccctgttgaggctgcagggcgaccttggggaatggtcaggtgtgtcacttcattcccccactgcagacagcattcgagactcaaaacaaagggagccacttctaaaatctcttggtctcagaagtttaattccagcctgccttgacctatcgtttcatcgcacgtcctctaattgaaatgtcctttctggagctcacatgtagctttttgttcctcgtctttgctgggtggggagacgagaacagggatcagagagatcccaagcgctcaaccacagataagggctgcttctgccattttcctccaacatgcagtatttccttgttagagcaaactgatgaaatatatgagaaacccaagaagggagtgggcttggggaaaacattgttaaaatgtaatatcgccacaatttaaaatgtttctatgagtctgattttcaagacacatttatttcttttttattacaagttctggtacttcttaatggagccacggcctcacacaaaatcgggttctccttggactaatatctttgaaaattaagttgatttataaccaattttctcctcatttaaacagcgacccgcaagggttcctctggggaacccacaggatccgagaactgatgtgttgccgagattacccagtgatgcggaatctttgcaaacatgtgcatatggcggtgggtgcttaagggagcaaaataatgtatttccttgttctacatccctgccttaattttggagttagacatgcgcattgctgggaatgaagaaacgctaattggataattacaaaaactcccatctgatttcccactttcaaatcggcttatctgccttgtccttagcacacacactccactgtgggcagtgggcagtgggcagagggcaggggtcaggggccctggaacatgtggcaaatccacttccacctctggcaagcctgagacacaagtccacccctgccccccccggcaaagctcgggaatgacggacggcagtcccttctctacagtcgatgttgaaggtggggtgtgtttagaatggtccaccagatgctaccacagatgtaagggaaacaggatggatcggccggcacacccatctcttctgttgagaaaatgttgtatttcattactgcaggcttgctggtggggggcttttccttaaactgaataataattgaccataccagcttcctagggttgcatttttgtgccagccaccaagccaccagttagtccttgtcactcccaaaaccctcactgcggctccacgaggtcattacttcattgcccccatgtttatggatgaggacattgaggcttgagagacccacagcctgctctaagcatcaccagctaagtggcacccagggctgcttttcagctttcctttccatggcagcattttttttaatgctacatccgacataatctgtattttattatttactctgttcattgtttgtaagttctgctagggcaggtggatttctcttgctgttcactgggtatcacagtccctggcaaagagcagtgctcaataaatatttgcttgatgaatgcacgcagacatgctcttagccattctatgctacctaatatggattattccaggctccctgaactcttcccaaatcaagaaaccactttccagaagtattttaacacgagctgccaagccttgactgttgaaatgtttttgacagtcagccttgccatccttagatgtcctgctcttttcagaccttcccagacctgtcatcgccagcgcctttcctgaagagccatcctacactgggtcccggaactgcagctctgcaaacaatagcacaggctcatgatctccctctgtctccatggggaagtatccctccctgtaccagagcagccctggccaagtggggctcagcccaagagcaggctggagccagacagctcggcccacagatattgatgaacagtttaaaaggacaagcccatcagcactaattcctccagggtcctctccccggctccaggttggtaatcaaagggaaagtgcactttggaaataattttgtttctgtgcagttcaaattccggagaccttgttttaaagctcatttgaataataacaagagcaattaaaaattaatatgaattgctattatttatggagtgtgggttacctgccaagggcttttccaaatgcttcccttgcactattgcactgtagcctaacaaccttgtgaattggctcctgtttatattctccttttaaagggaagaaaactagcactttgagagtttaagaaacttgcatttttctccccaagaagtgtggttaagaaatggccagtcctgaccaggcgcggtggctaacgcctgtaatcccagctacttgggaggctgaggcaggagaatcacttgaaccctggaggtagaggttgcagtgagctgagatcgtgccactgcactccagcctgggcaacaagagtgagactctgtctcaaaaaaagaaaaaaaaaagagaaaagaaagaagtggccagtcctggattctcatagttcccaagtgctgtgcttcccagcagaaacttggcacccaggcagccctcaagggcatgtttctgcttacacggctgtagctcagtgatgctgagtcctctggtccaaaccttgaccataattagaatgcatgctctgattaaaggcccaatatttttaaaaacagaagagcagctaaggaaaagacccaaaagctcaggctgaaccaaagttcttcttggtgtggccagaaggcccacactctaccccctgcagggctgtctggattccgggccccaccagctcacctgctcagcaccttgggtctaatcttctgatgcgtccctgcccttggagccccacagggaaatgacacaatcccctgtttactacgaggctgggcttcctcatgggccctgcctccaacttcgagacccagttccaccccaggtagctttggacaaatgatggagcctctcggagcctccagtttccctctaacatctcatggatgatgatgtcagcccacagggctgacgggaggatggtcagacaaagcctggattcgccctgcatggttcctggcacgagggcaagcttgaatggaggtaaaaataagatggtcccttccagtcccacccacactcaccagggccagtgttcctccccagtgctctgtgagctgagtggtctctgccttcctgggcccccacctggatgtccagaggccatggctatgatggttaatactgagtgtcaacttgattagactgaaggatgcaaagtattgttcctgggtgtatgtctgagggtgctgccaaaagagattaacatttgagccagtgggctaagaaagccaaactcaacctcaatctgggtgggcaccatctaatcagctgccagcaaggctaggaaaaagcaggcagaagaacctggaaggactagagtggctgagccttctagcctccatctttctcctgtgctggatgcttcctgccctcgaacatcagactccaagtccttcagctttgggactcttggatcttccaccgcagactgaaggctgccctgtcggcttccctagttttgaggttttgggactcggaatggctttcttgctcctcagcttgcagatggcctaatgtgggacctcaccttgtgatcgtgtgagttgatactccttcataaactccccttcatatatacatctgtcctgtgatttctgtccctctagagaactctgactaatacagtgggtatcacccctgtctggaagaatagcacggcccaggcccctgcaggttccacccaggcccctgcatgactcagcaagctggtctggggagctccctcctttggggctgccccccatgccagggtccacagtaacatgcctaagttctcccagggctggaaacaacctccgtgagtcacgccagtgtttgcaatcctcagcatgcttgctagcaaatgtttaacaaccagctctcaaaaaagcaaaaaaaaaaaagtttttaaaaagccccgatttttagcatttgccagttttcatagtgtaaatcttcctgccgtggtcaacttcaagccatctatgtgactttactgaatgtaacattgggaagagaggtacagcagcagacagtgatgtagtgttttaccatccccagtaaaatcaattcataatcttcaccacatagatagtagcaaaatgtagtcaagtaattaaaaagttatacatttttgagtatttatgacctttctttttaatacgatttgtttacttgtaattttatatcatttaatgtttacaatgtctgtgttcaacaaccagtgagcacaacccctgcaaatttaccatttggctctcctgagcttggaggagaggctgccgcacacccttggctctggccgcccaggcttttcttagctgagcttccacaccctgactgtggtccagtcctctcgcttccagcccatgcctgctttcagatgcagtctgttcccagctgcccagtgtttggacctccagaggctccatcccagggcctccctccagctccaacatcctgactcctcagcgcccacgtcacctcgctcatcaccagaaccacttcatctgtctcatatcctgtgaggcagacacaaaacaatgacacagcgaagaacctgggctggaaagtctggcagagtcggggtgaatcccagctctgccctttcccgcaagtgacccacttccccagcatctgcctacacacctgcaacaagggagagagaagagtatcaccgagggctgttaaacaaaccaattcacgcaaaggggcttggcccagttctcatcacctaataagtgccccatagaagatgccattaatactcacctcctgccagattccagccaatgctggggacaaaggcaaactccagcacaaaacccttatttcctgcgggcggtacctaacagcccctgtgtttccatgaagttagcagctgcagcccttcttcaccacaggctccttctcctccagcaccgctgcctctctcctcagagccaccaagcctcagaacaaggctctgacaacctgcagagaaggacttttcttggtttgcattgtctttgagctttgactttttaacagaatgggggtcattttgagtcaatgttttgacattcctctggagtttatttcctagctctaatggtcatatttggtagaggaagaactcttaaaactcaatggtaagaaaataatccaatttttaaaatgggccaaagatcttaagagacacatcaccaaagaggacaaacatgtggatgtcaaacggcacatgaaaagatgctccacatcctacgtcatcagggaaatgccaattacaacaacgagatgccaccacacagctgctagaatggccaaagtccagaacacggatgacaccaaatgctggcaaggatgtggagcaacagaaccctcactcatcgctgctgagaacgcaacatgcgacagccacttggaagacagtatgttggtattttgtaaaactaaacatactcttaccatacgatccagcaatcgccctccttggcatttacccaagtgaagtttgaaaacgtatgtccacataaaaacctgcacacagatgcttatagcggctttatgcatagttgcaaaaacttgggagcaactaagatgtccttcagcaggtgagtggataaacaagcaatggaatatccagacaatagaatactactcagggctaaaaataaacgagctgtcaaaccaggaaaagacatgaaggaaacctacatgcacattccgacgtgaaggaagccacgctgaaaaggctatacaccctagagttccaactacatgacattccgcgaaagacaaatctacacagacgatctaaagatcagtggttgccagaggtcagcaggagggaggcatgaatcggcagaatacagagggcttttagggtagtgaaactgctctttatgatactataatgggagatacatgtcattatacatttgtccaaacccgtggaacttacaacactaagtgagccctaatataaactgcagactttgggtgattacagtgtgtctgcataggttcattgcttgttaacaagtataccatctggtgggggatgttgataacaggggaggctgtgcgtatgtgggggctgggactatgtaggaaatctttgcaccttctgctcaatgttgctggaaacctaaaacaactctaaaaaaattaattcttcaagatgactaggagcaaattccaaatgcctcaccacaaagaatggtaagtaagtgaggagacgaatatgttaattagcttgacttaacccgtccacattgtatacatccatcaaaacatcactttgtaccccataaatgttcattaaaaataacattaataaaaaataaagtcttaagcaaacaaattatctctatgcacacaagaaaccaggacctcagcacccaacactccacctgtttcagttttgcttagttttgtaattcactgtacttagtctttattttgatttcacctatttgctgtctgatatggtttggctgtgaccccagccaaatctcctcttgaattgtcatgcccataatccccacatgtctagggaggggcccagtgggaggtgactggatcatgggggcggttcccccatgcagttctcatgatagtgagtgagtctcaagagatctgatggtttcgtaagtgtctggcgtgtcccctgctcgcacttctctctcctgccaccttgtggagaaggtccttgcttccccttcaccttccaccctgatcgtcagtttcctgaggcttcctcagccctgtggaactgtgagtcaattaaacctctttctttatgaatgacccagcctcaggggttcctttatagaatgagcccttctgcaaccacccagcaggaggcattagacggccccagaaatgagcagtaacacactttcccaccatttccccaatcgcttgacagcaagattcagaccatcacccgggagaacttagaacagccacccccacagcaaaagctacaccttccagaggaagagcatgaagtggcttctgttgagaaaggccatggctccctgacctggccaccttccccgagttacagcacaggctcacggtctcaccctgagtgacagccctgggtgattccaaacaggcctgacgctctccaggaccctgacacggatctgaactacacagagctatggtgatccggccggctcaggggctaaccaaagtgattccaggcagagcagccggcacttgctacctggggtgataatgcgcaccttggagaatgtccttaatgaaaatgtttagaaatcagatccagccagaggaccccccagaaagcactttcctccaggacagcatgacccctgtcctgggctgcggaaggaaaagcagggggttgaaagggctcaggcgggaagcctggcttcacctgaggaggggccacatcctgccaaggacaaactttgccttgtgtaccttatttaattttgatccggatacaatcagaatgatacaacacggccaaaagtctggttctccttggagatgttgatctcattagcaggacaccatcactcactcagcaaatatttactgagcagctactatgtgcccagcagatgctcactgaagaggcagccgtgccacaagcagagtgaacctctggctttattgcacatccatgccctaggaaagagacaacccaagcaaagctgcacagcctgtcgcacggggaaatgtgcaacaaggaataataaagccaggctggggataaagtgtgatgctctgagactcacgtggtcactttttgtgtggcttagcttccagtgcccggccctgttgcccacagctggacctccgccccgcagtgagtagttttgctttgtgtttggaagagggagcagagggcagggttgaagagcactgtgggcgctccatcaagcgagagcaggtccgtgcctgtgctctacacgctgaccatttgagtctccggccactgctgtcacaagccaccacaaagggagtgacttacaacaatgcaaatttattctcttacatgctctggatgtcacatgtccaaaatcaaggtgtgggcagagctgtgttacatcggaggctctgcaggagaatccgtttcctgccttttccagagtctagcggccgcctgcactccttggttcctggcctcttcctccatcttcaaagtcagcatcttccaatctctccctgactctgaccttcctgccccatctcataagaaccctatgaggacactgggaccacctaaatgatccaggatgatgtcccatctcaagatccttaatcccacctgcagagttcctgttgccaagtaaggtgacatcgtcatgggtttcagggatgaggatgtgaacatccttgggagatattttttcagctgactacactgacgctgaccccagagaaccctctgtctaattaattgaaattccacatctggaaatatcatcatgtgtacacacttatgctccctttgtggcagggacaaacacattattatttagggaatttattgttttccttgccaaaaggtgttttgttttgttttttaagtaatcatttaggagttgtacattttagcaacaaggagaatgaaaatggttgaaacggttaaacttgctcgtttttttttttagttgttggagaattctttggggttttgaactttctagagttttctctcgggaagatttctgaaatagaaactcctgttcgtaaaattacttggaccgagggccaccttggtggatctgggggaggatggacttgagcttgtctttgtgtgtctcactgtaaagcggcttgatcttagagtacaccgtcccagtgagagcctcagtaatcagagagggaacactgtgaaacccaccttgtttacaccgtcaccatgatgacggcctacatgatggctgctttgactctggggagatgcgaaacatcttcacaaagcatcattaacctccgcgcaattgggtgagctgccaggagggagaagccagcaggcaggagttagagggatgaggagtaggaaaaaaggcatgcaggggaggggacgacgtgcttgggcacaaatggagtcagtacctgatccctggaaaggggacaggagaggaacagagcagccaccctgcacgtccctccagcccaggagtcccaagtgacaagtggtgaaggaaaaacacacagaagcatcagggactggagtcctgccctctcgtgccagccctgactgaggcgggagtggcagcactggccagggtgggccctgccctcccgcctggatgcagagtggagcctccagaccacacttgacaaggacctcaggatggcctcggggcagggcggcagggctggaggagacagtggatcacatcaaggccacaggcagggggaagctgaggctcagccctccctggctccagggcagagggtagagaacctgctggactctgggccttgtttctcccaccagccagtcccgcagaggctgccctgacctcaccaacagaaaacaccaggccaggaccttgcattctcatctgctctgtgccttgcttcacttgtgaggggggcgcagctccagatgggggttccatgggcacagtgtggagaagggcactcagggcctgctgagcctccagaaatgcactgagctcaactgggggccctcgtggcccaggagcctctggccttctaggctccagccacccatgctgtgccgggctccacggaaggcatctcccaggcaggagagtggcggttcgcagcaggagcttagaggcagggctggctcggccacggaggttctgaatgtaaggcagcccaaggagaccgcccaaaggaaggggacactgggggaggcagtgacaatacctgccaagatccttggccacacacccatccctgcagagcactttacatggacgctttcctctccgggactgctgcaacaaaggcccacagactggagcataaacagcagggctgcatcgtctcacagttctggggaccaggggtctgaagccaaggtgtctgcagggccggttcctcctgcgctgtgagggaggctccgctccaggcctctctccagcttccagtagttgctggcaatctttgctcttccttggcttgaggaagcctcaccctgatccccaccttcatcttcacatggcgttttcctgtgtgtgttccccttaatacaagcgagtttccccttgtattaaggacactggtcatattggattggggcccaccctagtgacctcgttttaacttggtaaaggccctgtctccaaataaggtcacattctgagatgctggaggttaggacttcaacatacaaattttaggagagcacaattcaactcctaacaatagaacccctcctgtaattttcaaaacagaaaatattattttccccaatttatagatatggaaattgaggatttaaaaagattcaataatgtgctcagggctatgtacccagttaatagtggagccaggactgagatcccagtgaggcccaagcctaactctgctaaaatatgccctaaactgtagcttaacatcaaaacaccctgagttataatcaacctacatttccaaaaaatagctggcgatccccatctttggcaagatggcacctcatccgccaggaagggctctggtggggagtcccagaggtctgccaggtaatgagaaatagaaggggattaacctggatttctgagaaccccgaatggaagcggcacagaggctgcaagtccaggttttaagactcagaggatgtttgaaaacgaagactctgcatatcgaggtccctggggaaaagggggggagatgcaaatgtgtctctgagtgtactccagcaacagaaagggattaattgggatatttttggttgcaagaaatagaagacaacttgagctagtgtaagccaggagaaggagggttcatacaaaggaccccgcatctcatgaggcccaggtcagaggcgcaggcccaggaaaggggtggcgggcagaaagaggcaacaccaccagcctctcttagcttccaagccacgcttggcccctctgtggctgtctctgctgcccattccaatggcggtacgcaccatggcccctggtccctcagtcggcgtcctgttgtgctggagagacacttatacaagaatccctcagagccaggtccaaattcccaggacacagaatctgtcccaacttggatcgtgtgttcacaccatggtccaaccagctgtggccaggtgtgagatcaggtggtgggaatatggcaaatgggccccaccagggggaggggaaggagaagggtgaccaggtatgctgagccaagaccccaagaagccccttccccgagggttaagacaggaaaatctaggcttggttttcatattcaaggaggctgagtacagaacaagggaaccatgacaagaaattggagacccactctttgtttaaaaacaaattggggggttggggagaaggagctttgttctccacaaatcaaacatttcaaaccctgcaggatccggcactgctagaatcttctccaagccgggccgcctgcttctctaccggtctcttagcaactaaatacctgactaatactcaacttttcccagggctttaagagctgcaagatattaattccaagcaagacatctaaattgttactctggaaacttgctcatgcccccttcatgggtcagacactgaaaggccacgttccaagtatccttaccatctcaccctcgccgtccctagaagcaggattgaagtcccgtctccacacggccacggcaggaggggcggcctgggctcagatgagtggctccagattggacacacacagagcttgctttgccatgggtatgtttacgtgtcagttcccacccatgcactcaggaaaagcgggcccctctttccaaccctgagggaaatcatagaaagaaataataaaataggaaaacaaaattgctgatcgatgaaaaccacaagatgtttttgtttcttaaagacaaatcaacacaacatagcaggtatgaccaagggaaaaaaaaaataagcattgagaacaaaaagtaggacatatgaaaataaaaggactcaatttacaagctggaggccgagcgcagtggctcaggtctacgtcatcccagcactttgagaggccgagtagagtggaccacttgaggtcaggagtttgaggccagcccggccaacatggtgaaaccccatctctactaaaaataaataaataaattaattaattaattaattaattaataaaataaagaacgaacgaactcagggccttggctgtgaaaccccggcagcaggtgaacaaattatcccagggcttttgggcagcaatttgcctcttagtgtccagggagtgtcagggatgagccaccaccctatgcagggtgtgtcccatgagcacgaagctgccaggggaggcccaaggatcccagatgttggtcaacactgactgctgtcccttcgctctctctgtgttgattttacctgcaatgtctgtgctctgggcaggacctggagggtggggggctcctaaggatgaatgcgcttctagcttgggagaagcttcagggagcgttggggacacagagcctccccaagtctacccgtggtgggtaagagcctgacgcccacctgtggagcactctgggcaagagacttcctcatctgaaacggcactgttctacaatgggggtaaaaagagcgcctatttctgatggctcctgggaagggcagcacaccttagctgttctgttctgttatcctggcaacctgcgcttgctgaggctgtcactgtgtcacctacagatgaggccatcgaggccaggccaggtgagtgttggcccacagttgcaggagcagagcacgtgccagccctcacgggaagccacacctggatccgtggtctgtgccgtctccctaaaagcacgtggagcgatgcacctttcaaagtggccccgtgctgagtacaataaagccgcttaatttgccattctatcaactggaaatccttattaactagcgatcataccatacagtgataattgatattcataaggaacttaattgaaattaagttttaaaatagctttagtgttaagtgcattttattctaattcctggaaaattggtcatccatgtatagtagatgaggtaacaaggaaacatgctgaataaaaccactcagccccgactttcccagatgtctgggtttcctatgaaagaagaggggcttagcggagtccagtgggtgctcaccatactgatgccaaagaccaccccgaggtgcccatgaggctgcgtcttctctccccacctggccctgcgtatggatgcccctgagtgtcatcaccccagcaccacccccacccagtctaggaatctctactgggttgaacagtggcctcccaaaagatatgttcaagttccagccccagaacttgtgcatgggtccttatttggaaatcagcctttgcagatgtgatgaagtcaagagtctcaagatgagatcatcctggatttagggtgtgtcctgaatccagtaacttgtcaggaatgagatgagaggctgtgagaaacacacagagcaggggctatgtggccacgcggacagaggctgcagtgatgctgccaggagcccaggagctgcccaagctgccggaagaagggggaggcaggaaggacccgccctagagcctacggagggagcgggccctgcccacaccttgacctcaggtgtctggcctccagaactgggagagattccatttctgtttttgtttgtttgttttgttttgttttgttttgttttgttttttcgagacggagtctcgctctgtcacccaggctggagtgcagtggcacgatctcggctcattgcaagctgcgcctcccaggttcacgccattctcctgcctcagcctcctgagtagctgggactataggcacccaccaccacacccggctaattttttgtatttttagcagagacagggtttcactgtgttagccaggatggtctcaatctcctgacctcgtgatccgcccatctcagcctcccaaagtgctgggattacaggcgtgagccgctgtgcccagcccatttatgttgttttaagccacccagactgtcctatgattaaggcagccacagaaaaataacacaggtcctaattcctaatcttccttgtttgattctgcatattgaaggtgggcaacgtgaagctttacataaatatctatagtgcaatggttattgccatcaagccaattagtatctacaccactttccatagttaccatgcgtgtgtgtgtgtgtgtgtgtgtgtgtgtgtgtgtgtgtgtgtgtagtaagggcccctaaaatctactctcagcaaaatttccatatacaatgtaatattattagacctcatgctatacattacacctccaggatttattcatcttctttaactgcactgggcctaggtctgggcacatggagtaggtgaggcagggtgaatgagaccccaagggtctgtcctggagcttgtgatggggatgggccataaacagccccgagtgcaggaggatggggggggacgtgtgtgagtcctctcggtcatagcagctggtctcgttggcagtgcccagctctgtacgccttgcttctaaaggtgactgcctgcaggtgctgtggctgcaatgaggcagacggcagagggccagggtgtttgatggcagagatggaagagggagagtgtggggcagagctcattccatcttcaaacatgctgtgggggttgaactcagcctgcacttccctacacatgagcacagccagggatcacagatgcccagcgacccacgggcgtcccactgcctggacctcacagagccagtgcccaccacaatcccgctctgcaggcgggaatccacatctgattctgccctttcttcagaccctgataatgccatgagaatggaggaattaagatgtggctgtcagtgacgagctgtgagttctaaaaagtcctcatgaaaacgaggccaagttttatccatcgcaaaatccccacccaagaactcagcccacaagaacaatcgtccacagccttccaagttaacagaaaagagcggcagaggtccttagacatgtgcaaagggaaagcagccccagatacgcgccccccaccacacttccgtctctcagccgcaagtcccctgcacccagcagcccagccctgccagataaacactgcctcatcgaggacggtacaggcagatcccaaacccagtcattctaattatctctgaagcacatgctgaagactgatttgcatattgaaaatatggcagggcaggaagggagcgagctggcatttctcaactctgccagtgttgtcttccgacggcgtcataagacactcttctaatgaagtaataaaaacagtgtgaaatttcaaaccaccccaggacatctttaaatgacagcatctcctttcctgcggtgatgagaaaaggaatggcttagaagttacagaccacacagtgcttcccggggacccctgccacagccgaaataagctatctaaatacctgcatggacttctcactgttcatcactcagtctccacccctgaagcacccaccctcctatggtagtttcccatgctaactacctacctggctagctcccactcatcctcatttcccaggcaaacacgcaggtgactggtataaagtctgctgtgtgtgctcattccatcttcaaaaaaagtgtttaatttgttagcacttaaagtatgcataactgtaaagacagccaggtgctccagggaaactttgctttaaacaaagacgcatcttacagtgaatgttctgtggaccgtatctacgtgtgtatcaaacacaccacatggcactttgtaggaagctactgcatctctgcggaacagtgtgggaaatcagctcacaagacctttggaacccaatgctgtcacccgtagaagaagagaaaggttcctagaattggccttgggcaggagcttttcccaactcagtgtcctgatgcctctcccaggaagcctgtgttggccctgagctgccagcccctgagccccagaatcctcacccgctccccgcgcacctaccctcagctccagcctctcggaggaacagacaaggaacagatgggccagcatgcagttagcagctgagaaaccagttcatgctggggaggtacaggctttgggatggtccctccctagtcttgtcttaagataaaatgtcaatactttgtttgtcctgaccttcctacctagtctcgcccccgtctggtttataacctccttcatacactcccctccttgcccacagtggattcttcagccccggtaccctacagaactgttcctgcattttgcagggccccagagacccactgagctctcggcactcacagctgccctcctgggagtcaccctgtatttcttgaccctactttattccttatttctttgtttttcacagcacctgtctgacaagacctcatttttggctaacatgtgaattgcccctccagtccactcagcaaccactaccatggtggtccacgcagggagtggccatgaccgccatgagagcccccaaccctccaccttgcacagtgctgaatgtgcagagaagctccccaaatctatgctgggtgaacaaatgaacgtcttgaccctgtggaaacccagagtgggagaaagaggtggtgcccttgggaagcgtccacgacttagaccttcttaggtacatggcagcaggcagaggccactctcaatgtcatgcatgagaacggccccctggcctcacagaaggatgatagactccgagcaaaaggcactttatatcccatcaagacacagatggcattcgggtggacttgggctctcttaaactgaggcagacagagcacctgtctgttgggaatggtgattgagtcaagggacaaaagcattgtcagagacccagaaacaatcgagaattaaagcaggaggctgggtctaaaatgcaattcagtgtcacaacacaggctgggctgaacactgcctctgttctgggcactggtttatcacctccttcatactcacccctccttgcccacaagtggattcctcagccctcgcaccccgcagaactattccagcatttttcagggccaggatcttctcaactgtgccaaggtaaagaagtcgctgccctgccctgcagttcaccttctgaccatgaaggcagatgtgtgcccccaaagctgaggccttcttgcactgaggcattgagccacgttcaggctgtgggctgcccgctgctgtagacaagaaggctgagccacctctgacctcatggagctccaacattcatcagctgatgccccaaataataaataatgtctaattacaacttgtgataagcactgtgaaagaaacatgaagggtggcttgagagcttggcctacgtatgggcctggcgatctaacaggaagagccaacccatctagaatgtgacgcttgagctgggaaggggtggccaagtgtttggcaatgaggaggagtcagagacaggaaaggctacatcccatgaagggggcgtggcaggtctgcagaatggcaggtgggactggaatgctgagtaccagggcatgttgggggagacgcacacggctgggatgggggctagcagatgccatgccacctggactttctgacagtgttaaggctgctggtctttatctccagggtggcgggaatatccgcacatctaaccctacaccttctttatcagttttggctctaatgtccccttctctgtgatgtctttttttaaatacaagggcttgctctgtcacccaggctggagtgcagtgacgttatcagacgtcactgcagcctcaaccttctggactcaatcgatcctcccacttcagcctcccgagtagcagtgactacaggtgtaagccacaacccgcagctagtgccgcctttttgatgaacattccttaaaattaagacccagcccggccctccctgcctcccttctcacactttattgttttccacagcactctgccatttacatacaatgtaatttacctctttttataattgttttatctcaacagtttttggggtacaggtggatttttggttacttggataagttctttagtggtgatttctaagattttagtgcacctgtcacctgagcagtgtacactgtacccaatgtctagtcttttatccctcagccccctccctccctttccctgagtccccaaagtccattgtgtcgttcttatgcctctgcatcctcatagctttagctcccacttataagtgagaatatgtgatatttggttttccattcctgagttacttagaataatggtctccagctccatccgagttgctgcaaaagacactatttcattcctttttatggctaagtagtattccctggtgtatataggccacaatttgcctcttcgtttactccctgtctccttccactagaacatacgctgcaggaggacaggacatggtcttttcttggctggatttcttccctactgtctcttcagtgcccttgagggtgttgcctctggtggctcctagttttctcctccacattgaaaaggcacacgaattgcagaaaatcaagagggtttgaaggtcactggggcaaaggggaaaggtcggtccctgcaggaatcttagaaacactaccagacattgttgagggcccagtgtgctgggaagccaggaatttctagtgacactgatccgcacgaggggcggggggttcttcagaaattctcagcagtgtggctgtggagaatgcccacagctcagctggcccacgcaagttccacactgacacagggcaagggaggaagccaaccagggaggccgtgccgaggaagaaaagcacaaaagtattgctaaaaatgtacaggagaaaagagaggatgagaaggatcaggatgtgaggcagaatatgcttagctgccaacagcgcatggcagtatcccctggtgagctggagaagatgggactcagtcctcctgctaggcagctgagacctgcatggaccaccttttctgagacccagcatccgtgtggtctggtccattgctccgggagcaagactgcaggctccccagccctcccataggtgtgcactgaccttggaagccaaggtgatcagaaagctgctctattctccagaccatacaacagccctgcggtacacccagagccttccttattttaaagacagggtgtcgtgatttctccattgatggatggcgggcttgggatgccctatgaaaggcacatgtgtggcatggaaaattcacagcaatcttggtagtgaagcaggaaggcctcagatggaattgctgagagcccagccgagggaaggaatgcatggacattggttgagttctcattatgtgctggcctttttacactctcccatttgatttttaggataatctagtgaaatatgcatgtgcttccaattgtgtaacatttacgaggaaaaacacattggggggggggacgtttacatgcataataggcaccacgcctgaaactcaaagtacgcaagatgtttttattctttcaagacacttgggaatatcctcagaggctgttaaaaccagtccctgcacctgaaattgctaggcactttattaagttaaccgaaacacattttagaacataggtaattcacccaactgataaacttgcaaattgatttcagtgaattgaattatgttcgatttcagggatttggtcctgtagcaaagcgtttattttgtgaactgattgaccacagattagttttgccaacccatctgtttggatccaaagtttatctccctactcagccacagccctcccggaccagcaccctgctccaagtagctcctactttctgctgacttgtttacattacacatttggaacctcaattcattcatttgaatgtatcaatccacaagctggccacatgcacaactctgctaaatactgtttccaacaccccagggtgtagaaagacttagttacgaagtccattcttcctcctttcctgctgcagcacaaggagatgtggaatggactggctcagccccatctcacctcctgtcacaaggagattcgccattggatgctgtttaaacttgggtcggtatttggtgggtgacagatgtttctctgcaagagttcacagtccgcccgtcccctgccccacacagatgtgatttagggcatcatgaatcaatcgtcacttctggaatctcagtgagcagatgtcctctttagagattctaatccaaattgttaacctccagattcctctggcttttttttttttttttagaagtgccagttgtctgtgaagatgtcaaagggcataaatgttaattggatatgggacttaccgataggtctttcttgaatgaaataaatgcatcttatgggacaaacacacccaggggagtccaggcagaactaccaccccagacatcagcttgagcccggggatgtcatcagcagcaaacagatgcactgcagggcatccgaaattaatcactgctgctgacattttaataaacagctgcttttgaaattgctttggaatgagcacagattctgacccaatctttttgaaagaagatcagggcattataaagctgtctattttgaaagcaaggagaaaacaaacttgaaagtaattcttaaacagactcctttaggaatcagcccatgtggagtgaccctaagtaactttcatgagctcaggcccacaccgaagcacagggcagtgacatgcatccagggacctaacgccaggggtgcctggattaaccgtgtgatctttatggggtatctccccttgccgggactcaggttcctcacagagaatggggatagcgcaactctccctcttctgggggctttcgcaagtaactgaggagagagcagacactggacatgaccgccctccgagtggatacagtcgcccccaatgcaagacagcctctgtcacccactttatcctcctaagtggaaccgaggagcggctctactggaggaatcaaaagaattccaaatcaagtcagatccatagttctgcaacaggtgacctgggatgacgctcagcctttttgaccaaacatccagggtgataaacagaaggttggaaaggattcaccgcagcaaagggatccaatgatttgcttctggtgctccctctgtgttgcgagggcgtgtgaatgtgtggacagccgcgcatggtggggcaggaatccaggcccacatcctctccctgatgcttctctccgtgggccgcactttccactttaaatagctccaggacattcttttgtttcagtttttgtgtttcttgagaaggttacagttcttttacagccatgttgtaaaagaagttaaaagtctaattgaataaaagtaaaacaaacatccacagtgctaaataaagctgaggctagcgcactgccagcctccgatatcagaagcagccagaggcatcgaagagttgaatttctgtgggtcaactggggccaaaatcactgcataagtggcagagtgccgcagagttccccatcaacagtacagaaaaagaaagaattcacccagaatgaaacacgaccaccagataatcccctcctagttccaagcaagaggagctgccccagagcaactttgaatgtggatattatggccctgtgcaccgcgggtgaggggagtcaggccgggacatcaaacggagaccccccagggaccgctctctacgctacacacaggtcagagattagccctgggctccgcgttgctaaggagcttagcagtagtaggcttgacatggaagtaaatccagggcacacacctcgcatggcttagtgaggagagagagaaacgctgcaagaccgaggctctgttgacaatctgcacactgcagctgcctctgcgagctcttggtgtctcgcccctcctcacagggtctagatcaagctcgcaccatccctcactctgaggctggggcagcttcggtctgagcaacttggttcattcacagaggcagggaggctcctgcgttcactgcccctagcagggaaaacatgtcaggtcatcggcccccaccaaacccctgcctgacttcctccacaatgtgtcccacattgacacacctcgacccccgaacccgtgtcaggagacgtaagacagaagtggagacagctgcaccgcctgggcggagaagctgttgccattttcaggaggaaacggctaactcaagggagactctgtctaaatgtactaatgcttcagacgacatttgctttccgtacatcaccattttactccacagagaagctaatcagattgccgaaggagaaaataaaccagggcctattaattagcttaaatataagttttgaactataatatttagcaagttgaattctaaagtggagaggccaaatagaaaataatatctgctatttctcagaggctaaaatgttgttgtttctcaaagtcaaaacacaataggatttttgagatctgctttaaaagaaccgagggaaggcagcatagcaaagaagaggagatgagaagactggccctgtgtggatcatttttggatctgggggatgaaggcaggggccttaaagctttcccgtgagccaatgtgtcacactttgctggtttcctttcctcctgctcccaacaggctgagaagctcaatatcttatgacatgaataggatagaccccaagtcttaaggaatggccacaactgtcccaaaaccatcagcctcaagtcatctgcctgccatatgtttggtgcagagttgagacatacaacctggagacgtggcaagtgagaagggctcaatgactaattaatcaggacaatcgggattgttccagggagaccaggccatgacctggtcatggtgtggggaccccccccatgacctgagctgacggaagcaaggaccccacccatgacctgagctgacggaagcaaggaccccacccatgacctgagctgactgaagcaaggaccccatccatgacctgagctgactgaagcaaggagtatctcaggcccttgattcaagaggctcgctcatgccctttcctctctgtcaatgagaaagcgcctgggttgccagcagcagccatcagaatccagcatgggaaggagcccagagaaactgaccagagttctaactaagctgcggcggaagcccgccccgctgctgaatcttccaggcatgtgggccaatacctccctccactttttaagcatttgtgagatgcatttccggctccttccccaacaggacctgcgagttggctctcatataccccagaggagcaggtgtcatttcagagcctcctcgaggtcattctttctcaggttaagcatttttcctctgaatgggacaccttagcaatcacccataaactttgttgtgatgttcctacaaatttgttccatacgtgttgttttgttcttcaagtgcctggtggatgataaggtcagtggctaccccttctaattcttctccttgtcctcagggcttcccagtgcactctgggcagccactgactaattaaatcatcccacaaaggtatcctgcatgacacacaatgctgaccctaaatgcgaactcctgggtaggcattcaagagagggaccaggtctgacatttctcagcatcaggactcggcacctattctaaagctttttttcccaaaggtgtgctgtactaattcagaggctttgctcatatgtttctaagcaaacatggaaggaacctggtcagcttgcaaatggacaaggccctccccagtcctgatgtggtgatgcagcctggctacaccctccaggctcatcaggaatgacagctttgccctgtgggagttctgcgggtgcttaaggaccaggacacaaagctgcaagtgcccagcgacagtcatcttcgcctatgcatggtatctatttttgtcttctagtttcttaatttcaattctttgggcctattccctctctctctctcctccctctccctctctctctctctctctctctctctgtctctctctctctctctcccctcatccgccccccacttcccaccctctctctctaacttcagttgggttttgaacttggtaactatcctgtagcccctcttggagtacacagttgagtaaggctgaatacacacagtttggacaatcacatatgttaattcagggattccttaacctaccaattgtcaccaatccagcaatggctgacctaactgctgacacttgaagcttgcttgttcaccacaaaggccacgattaaacctaaagtgagctgtgggggtttattcaaattctctcttcaatgctgcacccccttcccagtgaaattaaaaaataggcatagcttactgcttcagcagcattatgtagcacgccagggacagctgggctcagaaaaatgccaacaagcttgtaagatggtttccaatttgccagcaaggaggtccctgaggggacccacgcacgactctttcctctcctagatctttgccattcctgagagccctgcctgggcaccttcaaggtttccttacccaccttatgaaagaaccaacggcttcttttgttactagttagacattcatacccaataatagagctctctgcaaagtgcacagtgatggtgctcccactgaattctgttattaacgcagccgtgcaatgtcatcaaaggtgtaattcagggctgccttggatgaaaaggaatttcaaaggcagctttctctggctgacttctttgaatctacttgtaaaaaatcagaacttgattccaagcttgttgcggggatggcaaattaatgaactgtcctcatgtcactaaagacttagctcagaactcaggttacaggaggattgggtttttattagctgctttcctgggagctcttgcaattccagccttttattgttgcctgggagggtgttgtatgaagctgatgagtgtttgctgcaaaaagcttaagtataatcagagattaagtcgtttctccctcttccactcttccttttccacagtcaaaggaatcaggaaggcagaattcaagtgaaaacctagcagtgcataattcttaaatgcaatagttaaaagcccataataagtacagcagctattagatgggtgcttttcacaaaaggttctgatgcttgtctctcctttgaaaggatctgctccttcaaatctgacttaggggatattcaatcagcatgaatacctccaaggtactttcaccataaggatagttgtcaactctttcccacaaagcaagacgtttacaatatatttacgcgggagtccacatggagggggcttgaatatgttcttgaatatgttcattgtgcttccttcaaagtggcgtgatgaggaatcagaggacgttttataagacgggaagaaggcaatttggcttcatgtgacacctttcatgctcaaagaatcccaacagcgaaatactcatgaagaataaaatgcttacactttgtaagtgagagagtggagttgcggcaatgaggctggaaatggaaaagagctcaaaccaagcacgagttggaaccaaactttagctaggtctccaggcaattgagatcccagcatgcggcggcaattgagacgaggaggatcttttcagatgtcttaagtggccgaagtgaagcccctccagagctgctgtggttgacgatcaccctgccgccagctgcttccttcaggtgcagtggcccaatctgtcccttgtttttatttactcgaagtggtcatttttcctgccttggcctgctttcaaatttataattcaaagaaaatcatgacaataagaacatgttctgtttgtctagtcactgataatttcaccatgactatcacttttgggttttctgttggtcctagtttctaaggatgaataattttacagagtcaccctcctggcttggacaggattctgtgttctgttttctcacttgtctttggtcacctccgtctcttgcctccatttgcctacattttaagggtgcaaactatcaaggggccaggtcgccgttttgtcccatattctgctactgttgaaactttaggttcattcatttattcattcacttaaaaaatgcttattgagcacctactctgaattaaagagataaagatgctgagatataaaggttttcattgggcatgaggattaaaaaatgaatagtgagtgaactttattctatgtcccaaggtgagaggttactggaaaagtcaacaacagcagtggaggaggaaggtaggtgtgtggaggtggagaggggagtctgcggcttcaaagtgtgcagcgtggtgggcctcctggagaaggtgatgtgggccaagacaaggaggtgagcgaggaagccacacttaggggaggaaggctccaggtggtgtggacatggaatatagtctctgggtggccaggctggtctaggggagggtcggcaggggggccagcttgggggtggctcctaatcattgctagtcaggcagcttcttctttgggatggattcctgggagccaaatcattgtgtctaaggttgtttatatttttatggttatttttatgtgtagtcaaattattcctgcaagggcctgtaccaatgtatactgctaccagcaatttatgattatagcacaggataaccccaatagcattaactattacagtttttaaaatatgttaatgtaatagattttaatagtttctcattgttattttactctattttaaaagggtgaaccttttgtcactattaccaacatcacggcagcacagaaatggtcccttcgtaattctcagccatttccttgaattgtcattgactcgtttatttaaagtagagttgccagatttagcaaataaaaataccaggcattgggttaaattggaatctcaggtaaacaacaaagaacttttgtataagtacgtcctggcctggtgcggtggctcactcctgtaatcccagcactttgggaggctgaggtgggtggatcatctgaggtcaggagtttgaaaccagcctggccaacatggtgaaaccccatctctactaaaaatacaaaaattagctgggcatggtggcaggcacttataattccagctactcgggaggctgaggcaagagagtcgcttgaacctgggaggcggaggctgcagtgagccgagattgcgccattgcactccagcctgggcaaaaagagtgaaactccgtctcaaaaaaaaaaaaaaaaaaaaaaagtcctgtgcaatatactaaaatattatcttattcctttttgaaattcaaatttaactaggcttcctgtatttcatttggaaaccctactttaaaagaatatttattaaagatctaccatgcactagtgtcccagggtgttgaagccttgatgttggtctcagtcatttgttaagtagatagatattaatttactaccatgatgttagtctgagtagtttgttaagcaagtagatactaacttattgccttttacatgaattccaaatgttctccagtatgtttatcttctatttcagttattatttctaattttagaaattttaatttgtggataattgacctttttttttctttttagtttatcttctatttcaaaatgaggaagacagggcacatctgacgataagactctcggatctcctgctgatgggttttagtgatacttggaaagacgcttactgctatgctcaagtctccaggaaaatgattcccaattctgagaggtacagattgctgaatggacttggatgcattcttaggttcagtaagaatgtttcttccaaaaacccacatatatacaccctcacagtccaatttcacatgaagcagttccaaaagaaactgctgctgctgctgctgtggttgttcagtgataacctgcttcaccaaacaaaaatgttcttcctgttctccatcctccattaacaccatgttaatagaaaatttgaccattgtaactttccctcttttaaattaaaggatgcgtgtacacatgagaaacgaggttgaggttgactttcatgacagtgcaaaagggttatcaatactaataaaatgtgtgaacaggaggaagtccaaactgagataccacttttggtgacacagtgtcttaggtgagttggaaattaggtcaggtcattttatttcaagtcttctgcccatatttcgcaggagtgcttcaggacccagatgtcacagaaggggccacgctgggcagggtttaccctgtacaccctccccaactgcacaggcttctctgtgcaacttgaggcagggatatgggggacagtgtgaggggtctctgtggaacaatcagggatggtggggtgctggctcactgccctgggtatcaaaatgtgacactgctgtggaggggtacgctagcaggctttcgagtcaccctctggtggctggttttcatggggccccatctctggggtcctggactgccaaatttactctctggcaagaggcccatgccatgcccatgctggtgtgaatgacacacatgcttccttgactctgcccactgtgtctaaaaattcacaggttgtggagtctctgccactctgcctccaattggccagtcttcagctgccctggggaggttttcagtccaggatgggatgggaaatgatgtctctacaaatattattaaattgatacataataattgtatatattcgtggggtacatgtaatattttgatacctgcatgcaatgtgtgatgatcaaatcagggtaattatgatatccatcacctcaagtatctgtcatttatttgtgttgagaatatttcagatcttctcttctagctgttttgaaatctataataaattatttttgtaactatagtcaccctactgtgctatcaaaaactagaacttaattatttcatctaactgtatttttgtacccattaaccatgctctctttatctccttctgcccccttccagcctctggtaaccatcattctactctctacctctatgagatcagtgtttttagttcccacatatgagtgagaacatgcgacattagcccttctgtgcctggtttgtttcacttgacataacctcaagtcccaaccatgttgctgcatatgacaggattttattactttacatggctgaatagtattccattgtgtatatgtactacactttctttattcatttgtctgttgatggacacttagattgattccattttttggttattgtaaatagtgctacaatgaatgggaatgcggctatctctttaatatactgatttcctttcttttggatatctattcaatagtgggattactagagcatacggtagatctatttttagttttttgaggaacctccatcctgtttactgtggtggctgtactaatttacacacccaccagcagtgttcgagtgtactagcattcctctttctctgcatcctcaccaacatctgttatttttggtcttttggtagtaggcattttaattgggatgagatgatatctcatcatgctttcaacttgcatttccctgattagtgatgctgaacattttttgtatatctgttagccatttgtatgtcttcttttgagaaatatctattcagatcatttgcccatttttaaatcatttgcccatttttaatcaaactatttgtgggctttttgtttgtttgtttgttttgctatttagttgtttgagttccttatatattctggataataatcccctgtcagatgacagtttgcaaatattttctcctatttggtaggttgcgttgtcactccattgcttgtttcttttgctgggcagaagccttttagtttgatgtaatctcatttgtctatttttgcttttgttgcctgtgcttttgatttcccacccaggaaatcttcgccatgaccaatgtcctagagtgtttctccagtgttttcttctagtaatcttatagtttcaggtctttcacttaagtctttaacccattttgatttgatttttgtatatggtttaaagcatcttaagatggagagctctcatgtgcatatgaatatccagtttctccagcattacttcttaaaaatattgtgctttcctcactgaatgttcttcattgaaaatacatgatgggctgtaaatacatgaaaatacacagtaggctgtaaatacatggatttatttctgggttctctattctgttccattgatctatgtgtctgtttttaatgccaatatgatgttgttttggttactatagctttgttgtatatgttggccttggatagtgtaatgcctcaaggttttgctgtttttgctcaggattgtcccattcagggtcttctgtggttccatatgaattttaggattgctttttcagtttttgtgaaaaaaaagtccttggttatttgatagggattgcattgaatctgtagatcagttttggtagcatggtgatttccacagcattaattctttcaatccatgaacatgggatgtcttttcatttttcttgtgagcactttaatttatttcagcagtgttatatagtttttcttgtggagatcttttacctccttggctaaattaatttatagggtttttctttgtagctattgtaattatgttgctttcttgattcctttttctgctatttaactgctagtatatagaaatactactgatttttgtatgttaattttgtatcccgcaactttactgaaatctgatatcaatatgttccacagggaaaatgcgtatggccaggaaataacaaactgatgctatgatcccattgcctttctgtatctaaatatttacaaaacaaggctcaagagatcactttctctgagccatgtgaagacacagcaagaaggtggcaagccaggatgcactcaccaggaaccaaatgtgttggcaccttgatgttagatttccagtcccaagacttgtgagaaataaatgtctactgtttcagccactcagtctgttttgttacagcagcccaagaagactaatacattcccttttaagcacaacttttgtttaatcaagaatacgttattgagttattagatgaagatattcagcaaaagaacatataaccaaagattctaacctttgggaggttgaggcaggagaattgactgaagccaggggttccagaccaacctaggcagcattgcaagaccctgtcagaaaaaataaaaataaaaagttagacaggcatagtggcatgcatctctggtcccagctacttgggaggctgaggagggcagatagtttgagcccaggagttcaaggatgcagtggctgtgatcagaccattgcactccagcctgggtgacagagtgagcccctgtctcaaaacaacaaaaagattcccaccacagctgtaacctcagcccctgcctatcccagtgcttggctcatcaaaagcactcaacaaatgtctgttgactgcattaatgattaaatgataccatagagtattcacgcatcaaagaaaacctttttaataatgtgacctgcaacgtgtgttctctcttctcttttccctgcagagcatatctgtgacagaaagttaagtatattttacaacatggtctgtttgacaagttcaatttcattttataagccaactgatttgttgtggaaagttgtgaggcaaatggttctcccaggaaagggaggttgccaagcgctgtgcttgcctccactgcatggcacatttgtcaaccccctctcattctcagcaagtcaaaaggcatcccaggccctcagcctgaccccagcattcagctggacagaggctgggttcctgccagctctccatgaactcacacatggcagacaggcctggtggtcaaagggagaggccaatgtgcaatcgagacggggaatcctggggatgctgagaactgtctcatcctcactcctgtggacacagctctgtgtattcaacgagcctccttggaaatgtgtgacttgcttgtcttctcagtgagcacacttcctgcaaaaggaagcatcagtcagaggcatgcaggacttggtgttctttctgacaacacaagcacaagtgcagcttgcccttagttctgtgaagcaaaatcagcatgaaataatgattttaggggaccataccacaatatttttaatatctagctccttttgttgggtctcaaatctgaaagaaagatctgaattctgggtcttccttgttgagagagagagagagtgttgaggggtgggtgtgacttttagcatatattttaaagaatcaccttacttgccagaataaataaaagcatgattatggtgaaccagctcagcctttccaggatacctttatttatttatatatttatttacttatggagagacaggtccttgctccgtcacccaggctggagtgcagcggcctgatcatagctcattgcagcctcaaactcctgagctcaagcaattctcacacctcagtctcccgcatagctgagaccacaggcacgtaccaccacacccagctaattttttatttttttatagtgttggagtcttgctttgttatacaggtaggtctggaactcctggcctcaagcaatcctcctgcctcagccttccaaagtgttgggattaaaggcgcgaaccaccaagccaggcttggacaccaaagccctgagccacagggtcagctcctaggtgaggggaacctgggatggccaagaacccctggattcttttatatatatgtgtgtgtatgtatatatatatatatatatatatatatatatatatatacactttaagttctagggtacatgtgcacagtgtgcaggtttgttacgtatgtatacatgtgccgtgttggtgtgctgcacccattaactcatcatttacattaggtatatctcctaatgctatccctcccccctcccccaaccccatgacaggccccggtgtgtgatgttccccatcctgtgtccaagtgttctcattaagaacccctgcattctgttagcaagattatgtctccagctccactggtgctgtccttagagattccaaggcatgagtctagactcttccagacttcgagccctcagcaccaccctggaaaagaccacagagccacagattccaaggctgggaaagttcttagtctctggcccctctgccccaccaggaacattccagagtagagttcattccacagatatatacccagtccccgccacatgccaggcactgggcttggctagggtcaaggtggatgatagagacgccaacatttcctgggtactcacccaatgccaggtaacacagctgcacctgaaagtttagtgcagcagaagctatgagaagagagtttgggcagacacattctttgaacagatgactgtgtgtgagtggatagagaaggaagggggtatgtggacagatcgatggaagctgtcgcaaatatccaggtgagaaacagcatggaaaatgatgttggggatgggaagaacactccaaggagagaagaggccagtggatcaaggatcagggtcctcagcatgagtcagtgaaccccgaagagtgcactatgaccagagaacctggagagaggcacctgtctacacagcatatatggctggagaaatataggcctttggtcatagtgtccattccattttgctcaggttaaagctcttggacttcatctcgaaggtgatgggaacccactctcagatcttaaagaagacagttgacatgatcagatttaacactcagaaattcaccctctaggctgcaggaggggtgctgggaattgagagaagagggtttctggaggcttctataagaatgaatgtcaaatcagcttcttcatttttaaaatgatgttaaaaaataactcattttgggttttggagagtctataaaataacaatcataataactatcattcatcgtgcacttaggcatcatgccaaaggcctcacatacaaaatctcatttaatgtaaacttcaaaacaacctacaagatagatttgattgcctgacttacaccgatgagaatattaagtatcagagagtttgaaattttgcctgagctcatccagctattagggcagagctggattgtaaaaccacaaccatttaactggggacatccaactcttaaacttctcatgtcctgaaatatatagagtaggacaggattcatttacatttcacagatgaggaactgaggctcagagaaattaacaattttcccaaccccagaagaagaggtctcctcagtcttataccatgttggttttatcaatcagaaggtaacactcagatgatttttatggcattatcacctactaacatcccaggtcagatattttcattcaaatgcatgctttcttatgagcaagacctttaatgatttggagaagaacaggaaaaaaaaaaaatatatatatatatatacatatatatatatatgtatttggagatggagtctcactctgttgcccaggctggagtgccgtggcaccgtctcagctcactgcaacccccgcctcctgggttcaagcaattctcctgcctcagcctcccgagtagctgggactacaggcacacaacaccatgcccggctaattttttgtattttagtagagatggagtttcactgtgttgcccaggctggtcttgaactcctgagctcagacaatccactcacctcggcctcccaaagtgctgggattacaggcgtgagccacggcgcccggcaaatatttttaatgcagtgaaaaagggagacggtgtggcagactccatcagagaggccaggcacaaagtcagggtgaaaagagagggcagctctaggagagcttgggagcaacagaggacatggcagtactgagtgaccaggaaggggctccaagggaatgcaggatgggcaggcagctgccggagctgaacagatcgtcctctcccatgaaggcctgtgtgaatcacctgtggtcccatggaaggcttttgccggcagggagtgatgctggaggctgccacaccctcctgcctcttcccagggcaaggagacaaacaaaaaggagactgatggtgcttaaaagtaagcttttccagatagttttccttttgacaacctccttgttcttgtgattaagctatttcatgcaattgctgctaacatctgtatttccagaaaagccaaagcaatttatttggaagatgaattcaagcccttgaacaaaccacacagaacattgtgactgaggcgaaaattcaagaagaaatgaaatcactaatggagttccataagtctggggctatttgtgatttctgcagacaaagtgactgagccccaacctctggcatcaaatccctgtgcagctcatccatgcgacactgtcttttacagagcggatcatgggaattcctggtctcgcctgaaacagtgaaattcctggggttatttaatccctcatttcactttaagcacctacttggatgattacaaatggcagcacatgtacaccagactcaccggcctaaagtcattatgaaaatgcttttcagctattctgttaaatcactgaggtttaaaaaagtgtttccataaatcctcaactctttaacaccactaattgcaaaacacacattttaaattcaaaacaactttctcagggggaggagggagaacacactacatttattgtagcttttatttttatactacagcccaatttcaggaacagaaaaatatgaaaaaagaaaaatgtgaatctttaaatggaaccgaaaggaatttgcctaaaaaagcaatgcttcaacatttttaataacatcttggagaaatctcctttaaataacctcaaagccttttcttgtcttaccttaatttagcttcagaaatttggggtaggtaggagggaaagatggcatcacctctgtttcacacgtggtcaagaggaggggagcatcctgctgaaaggtgctatcttagtccacccgtgctgctacaacaaaacacttgggactgggtaattcataacaaacaggaattttttttttttttttagttttggaggctgggagttcaagaccaagcctctgcagactcggtgtctggtgagggctgctctctgctttccaaacggggctctttgagtgctgctttctctggagggaatgaatgttatgtcttcacacagcatggcgcaagagctcaagagaaagcaccactttctcaagccctcttataagatccctaatcccctccatgagggctctaccctcatgatttaatcacttcctaaaggcccccaccccacttaataccatcacattggcaattaagtttcaacacatgaattttgggtgacccacacagactatagaattctgcctcagaccccaaaattcatgtccttctcacatgcaaaatacagtcctcccatcgagtaacccccaaaatcttaatacattccagcaccatctcgaaaatctaaagtccagagtctcatctcaatcatatatgggtgagactcaggttaagattcaacatcagaaaaagtcctctccagctgcaagcctggaatcagagtttatgtgcttccaaaacacagcagtgggacaggaacaggacagacatttctagtcaaaaggaagcaatagacaagaggaaaggaggagtaggtctcaggtttccaagtaagtccaaatccaacaaggcaaaccttaaagttcagctatggcttcatgtcccaccctctaggggttcagcccccaaagcctcgggtccccaaccctacagcagctcttccatttggtgtcatatgtctgtgactctctttggctggcattgcacactcgttactcaacagttatggggtctcaggggtggccctactctcaccactcttctagaccttgccctaacgggggctcactttagctactaccactcatggctccactgggcattgctctagtgtgggctgtcttcagcacccccacccttgtggtagtgctatgtctgggccccaagtttgtctgaggcatcctttgaaatctgggtggaggcagccatgcccccatagctcttgcactctgaaagcctgcagaattagcaccacgtggatgccactacgtgtttattgcttgcagtaatggtggctggaacggtggctggagctgcacctggggtagccaaggagtgctatgtcacaatatagtgggcagacacttgaggtggcctagagcagtgagctcagaggtcccacacaagtgtcctgggcattcccttgaaatcatctttcccttaaggccattgctctgtgggcctatgatggatatggcagccttgaagatatctgaaatattggtcattcttcccctgtctagatcaatagcatatggcttctttctatccatactaatctccccttaaatgttcacttggacacacacttgatattctctcctgaacatgcttttacaaaatggccaggctaagagttttccaaatctttaagttctagctctcttttaattataaattctatctttaatttttttctcttttctcacattttactataagctgtcaagagaggccatacaccaccttcaacactttgcttagagatttcttccaccaaatatcctagttcattattcacaagttctgcctttgccaaagcactaggacagagacacatttcaggccaactctttgccattttataacaaggattgcctttcctctagtagccctcatttctgtctcagacctcatcagaattgcctttaccatccatattcctatcaacattctggtcacaaccacctgagtaatctctaagaggattcaggctttccctacagctgtcctcttccaagccctcaccatatctcccttgatagtccatttacagcaatgcaggctttttctggcataaatctcaaaactgttccagcctctatgcattatccagttccaaagccacttccacattttcaggtgtttgttgtaacaacttttctgtcctggtctgtttgtgctactttaataacaaaatacttgacactgagtaatttataaagaacataaattcattttctcacagttctggaggctgggaagtccaagatcaaggtgctggtaagaccagcatctaatgatagctgctctctgctttgaagatggtgccttgttgctatatcctctggagggcaggaatgctgtgccttcacatggcagagacagaagagcaaatggggatggattatgtattctcacttgccagaagacaggaaaagaaagaacatactcactcaagcccttttataagagccctaatctcattcataaaggcttcaccctcatgacttaagcacaggctaaaggtcccacctcttaatgctatcctattggtgatgaagtctcaacatatgagctgtagggacatattcaggccatagaagctactcggcttgcagattgtagaagcagagctagagtccaaggctccagaatcctcatgagtgacagtccaaggctccagaatcctcatgagtgacttttttctctgcattcttcactcacgggttccctttcgcagccatcacattcaaaaagataaggacacccaccaaaggcaacagtctaggcagacttccaggaaaagagcatgttgtgagttcaaggcacatcatttcctgttgctgctataacaaaccatcgccagctcagtggccccaaaacaacaagacttactctcttatagttttggaggccacgaacttgaaaccagtttcactggactaaagtcaagggctggtttctgctggggactctggaagagacttcattttcttaccctttccagcttcaagggctccctgtattctgtggctcgcagctccttcctcatttaattacaaccttctgtttccatgatcacaggacttatgattgactaggcccctgggacattccagcaagaagcaggagatgaagagtcccactggagtgaccagccagagaggacatccagtctagcacaggtcggggtgggttgcagtcaccttgggaaggaccacagtacttcacccaaggacctcgtggtgacaacacagattccaggctctcagctttcctttgtagtaagtgaggctgcaaccccaggagcaaggaggaggaaaaggaacagattctgaaggtcatactccgagccaggttagagggtgatgccctgataaggtttggggtaggcggggattgcaggaatttgtgttttgtttaattttgaaagtgtggaagccgggcgctgtggctcatgcctgtaatcccagcactttgggaggccaaggcgggtggatcacaaggtcaggagattgagaccatcctggctaacacggtgagaccccgtctctactaaaaaatacaaaaaattagccaggcgtggtggcaggcacctgtagtcccagctactccggaggctgaggcaggaaaatgtcgtgaacctgggaggcggagcttgcagtgagccgagagatcgcgccactgccctccagcctgggcaacagagcgagactccatctcaaaaaaaaaaaaaaaagaaagtgtgtaaaatgtaaaagtgaatttgaattactaaatagcaaaataacttggtccatttccataagtttaataaattacacagtaatgggaaccaagtggcaatgactgctctccccacacactgaaaccccctagagaatttaaatcccaactaaatggatgcctcattacccccatgggctcagccacacagggttttctcaagcagttcagagttgtccttcccagttttaacctacagctgagtctagtcttcagggtattgaatatggcaggtctgatgggcagagggactgatatcatccacatcagcacaagaggatgtccttgtctctgccagagtctggtcctggctacaggcaggaccagggacaaggacaacctgttgctcacccagctgagcatgggcctgcctcctcttactgtcagccttgactgaccgtgtgtccacctggtcctcaccactgggctctggccctatctcagttacatgtatacttctgatggttgtggggtagggtcctccatacactctgtgcctttctcccctgctctggagctgaagggggttcaggggactgcccgacacatcgtctctgccttggcacacctgtggctgagagcagcttgatgggggttttctacatcccagggccccagctggggagctggacaccaccctcgactctcaatctcctaactgccatgccttccctcagggttcaacacagggtggaaggttcagggccgcctcgtgggaaactgcagcaaccacattgctttgctctcagattctttcccatccccaagcattcgaagcttttgtctggtctgggcaaatggggaatactagttttaacaactgattatgcatttttctttccctatttgtcactccagagcttctattcttcgattcaagagacttttctggcccagcctgtgaactgtaccttggtttccaaggtctgtttgaacctaaaaagttaggtatagacgccttcttgttctctccatttctgctgtaagaagcttaccctggggccctgcctcccgggatgggggcagccaggtacagtgtgtgatgggaagactctccagtgacaatggcactgttaagggtccccagcagcacacccagacacaggtgctgtttttatgcctgtcctatagcacttggcagatgtggcttccactggatgggtgccccggtagcaaatagatgcattatttctaaagactagagagtcagtttccaaattcccaagatggataacaggatgtctgcagcagactcaccttgcaaatgtctctaaaacataatgtccaggcctttacccccgagtcaatggggctggaggagcctgggatgctccatctctgtcattgttcagccagaaggttctggtgggcaactgggttgagaatccctgttacagaaagcttgtttcccaaaaaagaaccctcttagctcttagagagaatcataatttctggtgtttttgccaataactcagggacattaccagtgtaagaaaaattatctttacaagattgtggacaggaagatctttctgacttttggtaatgcactaagcataaagttcaagaccatcttccaaagatgaatgtcatattcatagtcaaattggttggtttcctttagaaaactaacagtttattcctatatttgcacttacattgtgattgataagattttttaacttacaatacaaaaatacaaactgcaaaaagtaacacaaaagtagaaaatgtggaaaacagaggtaaacaaaccagggaaaattgccactcataatctccccactatgaaataaccatattaggctgggcgcggtggctcacgcctgtaatcccagcactttgggaggccaaggcgggtggatcacaaggtcaagagatcgagaccatgcccaacatggtgaaacctcgtctttactaaaaatacaaaattagctgggtgtggtggcaggcacctgtagtcccagctacttggaaggctaaggcaggagaattgcttgaacccgggaggtggaggttgcagtgagacgagatcacaccactgtactccagcctgcataacagagcgagactccatctcaaaaagaaagaaagaaagaaagaaagaaagaaagaaagaaagaaagaaagaaagaaagaaagaaagaaagaaggaaagaaagaaccacattaccatgctggcatgcatactttccatccttttccccatgttaatgtgtagaaggtacacagacatacatagacagcattcatgcccctcccccagctccaacaaagggcacctcttcatgcacagaagcctgctgtcttcaggatacttggttccaaaaaacaaacacaacctctggttaacttaagtagaagagtgattgtgggagaaaaacaattgcttcctaaagctgaagctgtccatatcctaatcctcagcactggtgactctgtcacttcacctggtaaaagggattccacaggtgtgattcagttaacggtgttgcaatgggagataatcctggataatcacaggcctggatgtaatcagaaggggactgataagagggaggcaggggtcagagttagaaaacggaagcagaggtaggagtgacatggaacaatgagccagctctcaaaattagaaatcaccagggaagggattatcttccagcctccagaagaaaccaggttcgcagataccttgatgttagcccctaaaatccagtctggacttctgacctccagaactgtaagataatccacttatgtgtgtgtgtgtgtgtgtctgtgtgtgtgtgtgtctgtgtgtgtgtgtgtgtgtgtctgtgtgtgtgtccgtgtgtgtgtgtgtgtgtgtgtgtgtgtgtgtgtgtgtgtgtgtgtgtgttttgagatagagtctcactctgttgcccaggctggagtagtacagtgctgccatctcagctccctgcaacctgcctcccaggttcaagtgattcttgtgcctcagcctcctgagtagctgggattataggcgtgcaccaccacacccagctaatttttgtatttttaatagagatggggtttcaccatgttggccaggctagtctcaaactcctggcctcaagtgatccacctgccttagtctcccaaagtgctgggattacaggcttgagccacggtgccaggcctacttatgttgttttaaggcactaagttgtgatcatttgttacagcagccaaagagaattaatataggtgccttatctgaaaggcatctcttagctcacagaatccactggatgctgggaagccagactggcacagacaagccaaggaagcaaggtgcagccaaagcttgctcacagcatgaccggcgtgacgcccagacgtttgtctctggattcgctcccagagcttcccctacagggacttccgtcccctgccaccggacaactgccctttgacaatgggcttccaccttccctgcagttgccccactgactctgcctgaccccgtgccttcattcactccacaggaaatcacatccttagatgccccttgtggctttcctccagggtggccccagctctgtccaccaggcaaggagttggcttgtgatgtggtttggctgtgtccccacccaaatctcatcttgagttgtagctcccgtagttcccacatgtcatgggagggaccttgtgggagatcattgaatcatgggcgtggtttcctctattttgttctcgtggtagtgaataagtctcatgagatctgacggttttatgagaggtttccccttttgcttggttctcattctgtctcttgcctgctgccatgtaagatgtgccttttgccttctgccatgattgtgaggcctgcccagcaatgtggaactgtgagtctattcaaccttttttaaataaattatccagtgttgggtatgtctttaccagcagcatgaaaatggactaatacagcttgccttcccctgtggcctcaccttcctctgcagagctcagacccccacctgctgtctatttgggattccaaaaacagtaaggcatccaggtgctttggaatcaagcagccactccaccaggtggtctcacttcactctgtcctcgtgtcatcaatgtcattcgttttctacaatctaatcttttaaaggcttctgtgtacagttgaagcatgtaggttgtttctaatatattctattttaaacaacactgcagtgaacatctgtctagttaaatctttgggcacatccatgattattttcttaagataaacttctcaaagttgaactccagcacggatggtgtgacagcacatcaaggctcttgttggacaagactcagggcaaacccccgtgtcagtgacatgacaagatgcagggcaaaccccacgtcagtgacatgacacggcagtcaacattcttgttgccagatacattcatatgagaagtgtacatttgcacaatcacacacagaggcaaaaggtttttgaaagctggcattaaatactgtgtttctcatgactacgtcttttctcaggttctgtgttttttttttggtggggggcatagcatgtagggaattgaaatagtaatatcacagactccagcactggcatcaagaaagaacattatttcagtgataaatatgtaatgttcaaactttccttacgtgcggcaaatgtgtttgcctgccctttcgcggctcttcgagttagtgttggaaacgtgtccaaatatgattggtcacatctttggttagcatttcggtgtggaatagtaccgtttgaatgctaccctttccgtgtatctgcaggtgtgcacatgcatgtatatgtatgtacaaatagcagactatttctgtgatgaatatgtaatgttcaaacttttcttacgtgcggcaaatgtgtttgcctgccctttcgcggctcttcgagttactgttgtaaatatgtgtccaaatatgattgaccacgtctttggttagcattgcagtgtggaatagtaccgcttgaatgctatcctttccgtgtatctgcaggtgtgcacatgcatgtatatgtacaaatagcagacagattcaagtttcagtacagccaatcccaactagaagacctcggatccataatgagatgcatgacaaatagaagtcatatacccacagtacacatgctggagtgtccaagcattcatgcaattcttttcttttctcttctttctcttttttttttttttcttgagacagagtttcactcttgttgctcaggctggagtgcaatggcgtgatctcagctcactgcaacctctgcctcccgggttcaagcaattctcctgcctcaacctcccaagtagctgagataacagacacccaccaccacgcccggctaactttttgtatttttagcagagacagggttttaccatgttggccaggctggtctcgaacttctgacctcaggtgatccacctgcctcagcctcccaaagtgctgggattacaggcgtgagccaccatgcccggcccacgcaatttctttactctgcaaaaatatttttggctcagtccattcatacagtccagttgctcacagacagcgcctccttctcacttttctcaggaacccgcttctcaactcctacccgccactgtttctggttagtaagagggtgagataaaatatggagaatgcatggggaccgcgaagggggaggttttgaaatcgattaaaaaactcgacctgcgttagtattagatttttccttatgtttaattaagtctaattaaacaatgctgacatcttcttggcacctgtggtgcaatgatgttaaatatttaatgcttgtgaaggattaggctacacttctaatctatagctaacaatctgttccctctctggagtattttttatttagttctgcttttgtataatgagttacatttcaaaggagattgttaaaaacttcagcaccgatgggccacgttgttgcccagcggattggaaggagaggcgccatgccacgccacttctatctgggccagtcctcggtggtggtttcctacagagagagagaaggcaaaggtgaaagtcaccaaggggcctcttcaggggctttttcagccccatggagcccggtgactaaggacgctgaacacatggacacaagctcacattgaaaacacctctccatgctctgcagatatttccctgaatgttctctggcccccttctccctaacggctgtcagttgaataatgaaaaattatatttgtatatgtgtacatcttttgtatattgcatatttgtatattgtatatgtatgtcttaaaattgcatgtctttacccgcctcctccagcacacacccacccctctgcctctcagagaaaatgaagccgtgctagagagatgagcacctatttcaaagaactcgcttcaaaaaaaaagtctgtggctatttctggaactagaaatgccgagtaaggctgtttgcaaattgtcaggctcagcctctaaaggaaacccagtccctcctgattcatcttggcctgaagttgtttctgataggagaaattcaacttgctcttcgcatatgcaacaatcggtacgagactctcaaaacgggaagcctgctttcatttctctgatgattcctaatattttgaatatgtttaagaacaaaagacagattcatgtaatgagcttccaattggctgaatctgtgtaatcaatttctcagggtttttaattttcttccctcctccgcacagcatggcggcagtagaaacttcttactcctaagttggaaagaggatccagtagcctctttggttaaatcaattgaacttttaaaaatttaaattagctcacttatacaagttctggtggtgatgaattatcctcagggtttttgggcagagatgaaaattaactctactccttgcaattaagttccaagtcttctaaaaagagaccccaggagtgactcctgggaaggatggcttccccagaagccgcagctcctaccccaaaatccctcccaaggaggatggcagagaagaaggcagcagaaagccaggcacacgcacaaaaggaaagttttgtccataaatggagagatacattcggtcccatgtcaaatagcaggagctcccaagatctgtgggtgagtccgtgtatttttgatgtgcagtagtgacaattccattctggagtgggcagctcatgggtggattttaagtataattcatttgtaagaatctacctccacctgtaatcccagcactttgggaggccaaggcgggtggatcacctaaggtcaggagttcgagaccagcctagccaacatggcgaaaccccatccctactaaaaatacaaaaattagccaggtgtggtgacacgcacctgtagtccctgctactcgggaggctgaggcaggagaattgcttgaacctgggaggtggaggttgcagtgaactgagatttcaccactgcattccagcctgggtaacagagcgagactccgtctcaaaaaaaaataaagaaagaaagaatgcaccccccaaaggaaaacatggctttgccccaccagacccaccagagcagtggcaggaacaggaaacagctactcaccacatgttgtgaaggccagatcacgtctattcaggagcataactggattttcaaatataacttcacacttatgtaaaattaatagggtattcattataaaatctatgtggcatcttattaaatgcttcctgtcactggaagcagaaggtgaagttccttaagctggggttttgttgccctctagtgaatgaggtcagcattatgcatgcaaaattattttgattgctgcataattaatgtttacggaggtaggaaggagaaccaagccccagcctgttcacaagggctatgcgtgtatatctatgtgtacctgtgtgtgcgtgcacatgcgcgcttgtgtgtgtctccatcccccataaacccacccccaccttccctgaacttgacttcattaacatatggaagccatttcttctctcctgtcactgttatcttttggcatggaagtttagttttatacggctatcaacaggcaaagatccaagcataaagaataaatcaacagagctgatctgagacgcagcactttaatgcataagtgtatatttaatgtgtctgctgaaagaatgtctaattaccctgtcattgaacaaagcgcatgttcaactgtgataaattatgccatcctttacttctacaaaacatattgagattgagaaaagctgcagcaaaatcaccacatcatccacccaataggacaagttggcattgcccagaccaccacgggagcagaggagaaaccaccgggtaagggttcagaagctgcatttcaaaccttggctactgcgcttggcgagaagcaagccctttctgcacggcgaacctccttcagcttgagttgtcccctgtatcggtctgttattgacactagattcacggcgtctatattctgccattctgaatcccagtttgccagaaggctggatgccaatatccaaagagaagccagtctgtatttcaggaaaagggaagggaaagcccaggcgcctagcacctcagtgcttgctgcaggagcaaggctgctggcgtctccctgaggcttatttataggcacgcctcttcccacgagaggctacgagattcagacaccaggtgccacatctctaagaattcaaccccccaaagggattatagaaatgaggatgaatatattatagcaatatgccccttttgagctgcaccaaggagagtaacgcaaggagggggtacagtgggggaaattgtgggtgacaggaaaccaaccaaagtgcaactactgatgcgttcagcccatcgtgggtgggaggagacccaggcgataatatctgagaagtgttctagaagccagggacatggcggccaaactggggtgatgtcagggaggtgtctcctgctaaggttctgcaatatggattcatctcagtaagtaggtcaccaccaactcacgcccacctttgtcaccccacaccctccacccgctttccttccctgggtctcagtacagacctgtcagctccccagccaccagccttggcagtccccaagccctccacaagcaggagaggcagttccagcttcgagccccagaaccaggtgcttgtgtcatgcaggagcagagtagaaaccacgctgtgctgtgtgatttgtgcagcgctggggcccacggacacagaagcgctggctttctttttatgtcagcaagagccataacaaaccagggagagaaaatatgatttcatctgccctggtatctattcctttcctgagagaatgcccagagtagcagtctgtttcttcaatggcgattatatttcttatttctttgattacctcttgtaatagcgttcttttatttaccgacatataagagaaggctttaccacgatgtctccatcacgggtaaaatacacatcccgtaacatcagtccctttatttgctttcctgaattgtgatctatagactaaagggcaaatgaaaaatagagataaaaaatctatttctgataccatattggctctaaaatgtcaaagttttctttattgctttaggagatttgtacccttatttatctctctcgttttattttcaaaggctgcagtctccgcactgtttgacgggatgctgttttcatgtacaatcagggctctcccttgctgcttgttggtattttatcaagacctcctaaggcagcagagaaagaaaagccagaaacccagctgcacagagactgcaggtcagtcactgatatgccacgtgggtggccggtgacacgtgcacgtggccacagctgatctcagtaataagcagtgataggcactccatgtctcagaatactaagaaattgatagacacactaaataccgtgcttctaaaggaccatttagggtctcaagtgatccgaccagaattgagtagcccaagctgtgtgccagggtcgttctgaagttaaaagctctaagttagtcaaaattcttccgctcctggaaacaaaatgtaccttcagaatgaggccgtatggaaggaggtcatttcctctgttccggtcaaactgactaaatggagaacataatgaaattgtacttgaaacaaaggcaaggattatagcagagaggctccttctccctttttaacacttgtctccaaaactcaccaagaacctgggctgcaaaaaggaagagaagagaatgcccagaaatgcttcccttcctcgagcctgctccacgtttcccgtccttccaagatgggtggattgaagttctaaaaaatgatgaactaatgattctggaaaaaaaaaaatctgtgtacttccctgagacagagactggctttgtcctagaaacgttcttttccatcctagaaatggaaagaacaaacagaaaggaaagaagctcacgatttgaggagtactggagggttttccatcctggcccaggcagtgaagccatgctagtccacgcggtagagtcacagcactctgccagaggaggtcttgcccctccatgcaggggatacctggaaacacctggaaccacatctggttgtcacagctggagaagagtgggtggaggcctaggacgctgccgtacaccttacagtgcacaggatgacccccaaaacagagaattttctggtccacaatgacagtagccaatcaggctactgtggagatgtggagaaatgtggagatgctgagaaatgagaaatgctcctctagagagactgtcacacatttcagcactgggcagcttttaattatttcttataccttagttttgttttcttaaccaaagagtctaccgcatctctcagaattatatttcatctcctgagcccctggcaggaggatgagccttcattatgtcacccacaaagatgagacttgctggtaaaggtgtgtcagaagcccagagacctctcagtgcccagtaaagtgaagactttggggagcagagaaatttagaacagtcatgacaagtaccaccgtccatttaaagatgtttttcttcaagtgtcttcttccaaattgccaccagcccattcatttaggtggcaattgcattgctgctggaatgctaggggaaggaggagaggccacgacgaagctaaaaaagcgaaaccgccacagcctggggttcggatctcgcctccgccgcagctcgtgtgtcactgtggccagtctctttacctctcaggcccttagattccacctttgaaaaatgtggttgatgataataaaaactacccctcagaactgggattaaggactcaaagaatttgaaacgtgtttaaacatgcccgccacattttaggcgctggggtcagaggttctggattctccttggtgcatctgtttctgccccttactttagagccatgacatcagactagtgtttccaagttttttaaacattttttttctggcttttcctgatgttcattttgaggaatgcccaggaaggaggctgtggtcatgtctggctggtggtgctccattgaaaagacctgtggctctgacagccttttgctgtgtaggcagttggtgagtctgtgacccatagttaaaataggcactcaagtccaattttttttttttgagacagtcttgctttgttgtccaggctggggtgcagtggcacaatctcagctcactgcaagttctgcctcctgggttcaggcgattctcctgcctcagcctcctgagtagctgggattacaggtgtgtgccaccacccccagctaagttttgtgtttttagtagaaacggagtttcaccatgttagccagcctagtctcgaactcttgacctcaagtgatccactcacctcggcctctcaaaatgctgggattacaggtgtgagccaccacatccagccagagtcctatttttttttttttaatctttactcttgtgtaaagtgcttcagctctggttggcttatccagccaacttcatgagaactggctgatggagtaactgccacctccaaggaagattccagagtcatcctcacatcagatccatccaggtgtagggggtgccagtccaaccatggggaaatcctagtgtgtctgggcatagtattataaccaaattcaggacacagaggaaaccagcgatgattgggattgaactgtgggagggtgcctgacatgttatcacaatctgcaccaccttagcaatcatttgcctaacaaagccattcagccaagaaatctcagccctcctgtctgtagtcaggtgcaccagaaccatccttccactcacctctcggccagtgaaagagaataaaatcccggcattccccaagagaaggaagtcacacagattaaagttcctagcaactggtctattgatagaacaacaggacagaatttttagcctaaaataatcatgatcaaccgtccttggcatttttcactcattgagtaatactcattggaatgcatttatattttctgtgtaataaatcaaaagcaaaacaccattgtttctaatttatcttgtagactgctctagtgatatcttgccactgctaatatttccaatatttctttaaaatcataagataaatgggtcctgaatcttcaacgtggtggtgatcttcataacctaaaactttatttcggggtgggggggttctttcttttcttttcagtttctaaggaaagtaatatacaaattatgtggagcaagcactaactgtcaacactaaaatattgactttgctcaaacgcttacaaagagaaaacattaacaattgtgatcataagtagacctggtgtaccaagcatatgaattatgaatcaaaagacagaaaggtgctttttttctgcaaagacatagaacaggatattagaagcccaagggaaaataaatgtgtgtgctcttggtgctccttacgtccaccatgctgcttactcagcacaagcacctgctgcccatttgttccttctccagggtgctgcccacagaacacagtaaacgctgaccaattggttgattgaaaaccactttaattgtaggaaattatcattaatttgaactctgctaattcagaatttgtgctcatgcaggctttggtttaaaaaaaatcttcatgaaaaacttttgctttagtagacacacctaggtgcaaatccaattcctgtacaaacacagggattacatttgttgtattacaccatgtgtaggagcacatgcagcttccaagcaggttccagacatgcgtttccctataaattcttatgatatgctaattataaaccattttgcctgtgtttaatttttattatgaaataatatgtcctcataatgaaaaaactagagtatgtaaaatagaaagtggaatcttctttgattgcacctcctgggtgaaggtggctctctacttaccccaaatgtttttaaaatctaatcccaaagggcatttccctgtcagctgaattcaagttgaagtcaagatggaagtaatgaggcagttttaaaataagtaatcattagttcagaaccttcaataaaatggaggcaagtcatccatctaaacgtgctccttaaggaatcctccctccccttggtgatgtcacaggagtcccgaggccttgtgaaaggacaaggtttggaagtaagattttgtgtttcttccaccctctgagagtgcatgtgtgttcttgcctggaaggccgtgtcagaaccaaacagagaggctgcctggagagcacctgtcagcctgatgccatgacagcatcagtccattgaggacccctggaggggatgacgaagaggtggccagaggaaagacaagaacatgtggggaagagagggagctacaggtgctgaggggctctgtcctcacagccacactggacttggccccgtggcgctctgtagcaggctgcagcccagagggtggctcccagtgccagcaaagatccacacgcccaggcttagggtgggtgctgcagagtcccccttccaggagccatgcccaactcgacaagggcacatttacagggaccaataaagacgaaaccccgaggcagctccccaggcttctgtccctgcacacctcctctgacaccctagcagcaaccacctgggggtgaagccttcgcaatgactgcattgaattctcatcacgggagcttgcgtcagccagggtcctccacagaagcagaaccaacaggatgtatgtgtagagagatttattgtagggaattggctcatgcaatgatggaggctgacaagtcctgagatctgcagggggagctggtaagctggggtcccaggaaagccgatgatgcagttctagtcagaagtctcaagaccaggcaagagccaacgttgcagtacaagtccgcagtgttcctcccatctgggacgccgggagtgttacctgcacaatgggtgggttccattgcttgtcaggtgatagtccagtagccacaagcaacgaagatttaacaaagggattttattacttgcagcaagtaaagaggacaccagggatagtccctaccctaaagcagtgccttcccgaacaaagctgataacagggcttttattaggctggtgagctgagacattgcatgcagaggtggggtaaaagcggtgcaggcgtggctgctgatcatgcttctatgtacattgcatgtatagaaaacggcaaataagctcctccctgggccgggtgtttagcgtggtaatgaggagagttctccaaagctcatctccaactcaggcatctctggaccgaccagattttgtttttccagggctgagcttcttcctggaactttctgaaacaacaaaaactgaggtacaacagttacaaacaggtgtttttgtgccatgcatgtcccaaacccagggatcctgcgttacacaatggcaggaaaaatgcagctgcccctgaccaaagagcatcggacaggaggcattctcccttacttgggggaaggtcagcctttgtgttctatgcagtccttcaaaggattggacaaggccccccatactgaggtggggtaggggacaattggctttactcagcctgccaatttaaatgttactctcagccaagcgcagtggctcatgcctgtaattccagcactttgagaggccaaggtgagcagactgcttgagctcaggagtttgagaccagcctcggccacatggcaaacccatctctaccagaaatacaaaaaattagccagggaggctacttgggaggtggaggtgggggaattgcttgagcccaggaggcggaggatgcagtgagctgagatcacaccaatgtactccagcctggccaacagagcaagactgtgtctcaaaaaataaaaataaataaataaataaataaaaataaatgttaatcttatcccaaaacaccctcacagacgcacctagaacaatgatggaccaaatatctaggctttccatggtccaatcaagttgacacctgaaattaaccatcacaggctcattaatgattgcatgtatctcaaagaaaaggatgtgttgtatcatagctgccctgatttgcagattaatattcaccctttaacagaagcaaacaggtgttgcaggaatgatggccaggttgcttactgccactgagtgtggaagtgccatcattgtatcctcctgtgcccctctgtctcttccttccttgagtctgtcctttgtgaaatccattggctggatctgtcttcactgtatgctaagaaaacagtaacaaaaatagcctgcttcttctcgaatcaccaagccaaggatgctatgagactgtttagcccacagctagataaaacactgacagtaaatcacttgctctttctaagggttataaacgtaacaaagagctgctgtggaatgagttggagctgcccgcccgagttccaggtcattgcccatcgatgaccacaaccagcagcagctttgagctggcccggtgaatggccggaggcttcgcttttattttcagctgctttctgctggcccaggagcagactcaagagggagaagctggaggagtcatttgccttcttgttcatcctcccattaattaaattattcactgagtgcaaggatcactaaagtcctggacatgcctggcactgggctagatgagcaaaagtagcaaacgcccctttggtgctgagtgagggtcgggggtgctggagctctgtcctgtcctgaacagcaagtgccttgcgactctcccctacacacgccaagtgcttgtgatgctccaaacgtatccatctgtgaatgaaaatatccacattaatgaatggatttctgctaacagccagctcaactcatttgcaaaactgttggggataaagttttcagcaggatgcagtaaaagggaattggaccataactaaatagatgttcctaaatacttctttccagatcactgcatcattgactcaagcccggggcccagggtcctgcgccagtccatgccgggtcttagacatgcttcacccagcatgaggctatggggctcattggggatgcgcattttcccagttggccaaaagcttaggccaaggatgagctctttgaaaactctggcccttcctcagatgcattaaagaggagtggcttggctcacaagtcacttgtcttcagggaacacctgaggctaagtggagtccttgcttcggcatggaatgctcttggtgcaagcacaagacctctgtctactgagagggcaggaatgacggcgactttgtggacaggttcctctgtcattaaaacgaagaagtgacccagctgcctctgcccatccaggccctgctcataagacaggcaagggtgacacaggtgggcctgagacaggcaagctggctggtttcctgtttccacatggtctggagaaaaaaaaaaaagaacaaaggccccttcctctagctgtaactccagccaatcagcgtcaaaggcccaagaagcttttaaccacatgtttctgctttaggggatcggtaactttcccaaggccctgcatgcacagctaggcttaacttccaactcatagttaccttttccttatgttaatgctaaaactcatgtccggaggtggagatttcagatgctaatgagacatatgttgtatgaagggcatggtggactaccatgcatgggccaggaaaaccccaccgctacattgttccccttacttccctttactgcagagcctcataaaagaaacccacaccctgacttcaggaccctcctcgggcacccacacatgttcacacccacacatgatcatgcaccatcacaactgctcacactcatgcacactcaggcactggcacactgacacacttcttatcttccagcttgactgcagacgtggtctaataaagggctcattcccctggcagctgtgatgggatccaagccatggggctttttctagaaagatgggacagagaaggtcgctttccaatgagctgccaccttggaggtctctgcctgtgcctggaggtcgtggagagggagagtgagaaggcaatctgggcactgttgagcaccgcatgttttcagctccgttcaccagtagatcctcatttctgcttacacctgccagggataagttccatcggtgcattcagttgagtccctgtgggttcaagtggacaccccagacacccatggggctctctggaaagtatcagaggggaactaaagacaaagtgagtctcagcacggctcctctgaggaccacctctcctgctgccagggaccctaaccatcccatgttccactcttttgccagcacctttgctgctgggcacttaggcaggcttcccaaccagagggttatgtgcactgctatggctgcagacagtcgtatgtggttgcaaataatctgtggcaaattaagcactgcagctggtaaataatatattttaagcatattgcaatagatgcaaaggcactattcttgcattctggttttctttcctgagtggaggggtttagaagcacccagggatacatcacctgcgtgagcgtcgcctgatgtgggcatccagtcctagaggttctgaacatgctgtaccatcacattgatgtgttttggacaccccagatgcttgcacctggctccctctcccaatgtccctaggctcccagctcccagcctcctcgagcctgatggtacgtggggaaggaatacctacacaggccctgtatgtctgacctgcttgctgccactgcccaccttcctgccctacagtgcagggtctctcccatccctgggctctctcctttcctgggaggttgggcactcactatccctctgcctaggctctgtcccagatctctttttaattttttttattttttttaattcaaacaacagatgtgtaatggctcacaatctagaagccagaaacgtgaatcaagatgttggcaggaccacaatcccccacaggctctgggggaggctccattccttcctcttcttcctatcccattgctggaggcttccagccatgacacccatctctgcttcctcctcttctgtctggcttacctctctgcctccctcttagtaagacccttgtcacaggatttaggccccaccaggataatccaggagggtctctgcatctgaagatccttaacttaatcacacctgcaaagactcttcttctaaatatggtcatgttcacaaggtccagggatttggatgtggacacaccattcaggaaagtgactgcagtgagggcctcttgttctctccccaacttcacagttcgttctggctttgttttaaatattccaagataacaatgaatgtttttttccccacaaaagatgttcacatatatatatggggtgggtggtgggagtgtgtatagtggttaaatacatataacataaaattcactattttgaccattgttaaatgtacacatctgtggcattaagtgcattcacactgtgtacaaccatcttgaccatccatcaaccatcaacaccatccatcaaccatctccacaatccatcaaccatctccactatccatcaaccatctccaccatctaccaaccatctctatcatccatcagccatctccaccatccatcaaccatctccaccatccatcaaccatctctaccatccatcaaccatctccaccatccatcaaccatcaccatccatcaaccatcaccaccatccatcaaccattcccatcatccattcaaccatctccaccatctatctgtcatctctatcatccatcaaccatctccaccatccatcaatcatctccaccatccaccaaccatttctaccatccaagaaccatcaccatcatccatcaaccatcactatcatctaccaactgcctccaccattcatcaactgtctccatcatccatcaatcatctccaccatccatctaccatcaccatccatcaaccatcaccaccatttatcgaccatcgccaccatccatcaatcatttccaccattcattaaccatctctactatccatcagccatcaccaccatccatcaactgtctccacacccaacaaccatatccacaatccatctccaagatcacctcagatctttaacttgccaaatactcgtcagcattaagtctcagctgaaacgatgttcaagatcctccgtccctcctggactctccttcctttatcacatgttactgcctcaaaacccaactctctaagagcatcttgttcatttgtgtgtttatattgtgcctactacctgcacactccctgggggctgggattactttctcctagcttatgacggtctcttcagtgcctagaactgtctggcctgcactcggtacccaaaaaatgcatgacatgtgaataaacatgtgtatagggttgtgagtatcaagtgattcaactcttgtaatgattttagctaagctctggacaccctgcaagaactcaagaaagtgtctgtattgctattaagcacttaggaatgtcatgttttaggttagctctttggttacaagcaacaaaggctccactcagactcacttgggggcagggttttcactctggttgtacaggaagccatacaaggaatcccaaggaatctgaggtgtgcaggctgtggggcaggttcttccagggacccatgggggcaaacctgaatctgggtggctcagagtcctctgtaccaggactaggaggctgtgtctcacaggttcctccagaaactgcccagcaactggctgctccctacttcttcctgttgcaccaaacactggcaaatccctcccatgtgtctggtacaaatgagcctagttgaccatgcttggatttaatccagaccataggggttttatgtcattgacttagccaggaaggggatgctcctcagtcagatgcttggccctggaccagtcagcctgggagaggcaggaccacagggtgccgatgctcctgctgtccccacagtgcggtgagggcaggacaggttttgcagcttctcctttaaaagggagcagagaggctgctgctgggccaggttcccaactgtgaacatcatatagacagacactgtgctgcgctgaagcagacctggatgattttcaggaggagagggtacagaccctctgccatagagcccggtctcaggcagatgtgttctctccccgagttgggcaaggcacatgttgtggcattgcacaagccctgtgtccccaaggggccttgaaggagaaggaacactcccatgggctgaggccaggcttccatgtaggtcctaggagccagaagaggggctcttgcagctgcagacccaagacaacaaaactaaaaatatgttgaatttgcaaagtaaagagaaacggatgggaggtgttgggggagtaggccttgcccctctacagtgtgaacctgcagggtttcctccatatccctccctcctcccagctgcatggctggaaaccaagaggaactcaaagaaagatggtgatgatgagtgtttctgtgataggcatcacaacggcagaagcaacttcaaactcagaggttaaataatatatcattgtgtgtatgcaccacattttgcttatccacagcagaatttttttattcaggagcccctggaaatgggtgctccaccagtttggggctctctgagcccccgatggccctgtcttcatggagggtccccatcctcactctgttcacctcttctcttctctttggatagcctcaaatttcatttagcctccagccattgattcttccatggattcaagccagtcaactcatctcaggctgcactggggttaggacaccttttggaaggtcaaaggacttttataatccctaattgtctgctgctcttgaccagcagcttcctgcatccctaccctccagagggtttgagccaccagagacgtggcctctagatgcccagccaggatgctggacaacacctacatgtgcccacattttttcaatcgtacaggtcaacacggtttgccagcacccaaaagagaaggcagaagtgaggatcctgaaaagcgggctgctttgtggttcagcccagcacactgaatgaggaccagcaagtaaagtgagctggctgctctcacaagccagaggtttattatggcacctcagaaaattaaggtgatggtgtattccaatgtttgtttcatgaaatctgtcaatgaaaataattagaggcaatgatcttgaggataaatcagagctaggcagaacaccattctgcagaatatagatatactggagatacaagaggctcttaatggtcagccccagggagacacaggaaaatcaaatgttgtgtgaagccctgtgaccccaagagcttgtctatcagaaggcttccctgcactgccatgttcacaatgatggaggcggcattgcctactcagttcctgaaggtgaaactgccccagtgaaaagttaaaatgcacctcaccttcggcagagcagtcctacttctccattcccagtctagggagatgcctgcatgcaagaacaagaggcggcacacagaagggggttcattgcagcatttatggtattagcaataaaattaaaattaaactagaataccactcctaggtatatggccaaaaggactgaaaacagggacacaagcagatacttgtacatgagtgttcatagcagtacctctttccaatagccaaacagggaaaatgaaccagatggccacgatggatgaatggatgcacaaattgtggtgtgtgcacacaaggaaatattatttagccttaaaaagaaaggatgttctggccgggtgcagtggctcacacctgtaatcccagcaccttgggaggtcaaggcaggtggatcacctgaggtcaggagttccaaactagcctgacatggtgaaatcacgtctctactaaaaatacaaaaattagctgggcacagtggcaatcccagctactcaggagggtgaggcaggagagtcacctgaatctgggaggtggaggttgcagtgaactgagaccatgccactgcacccagcctgggtaacaaagtgagactctgtctcgaaagaaagaaagaaagatagaaagaaagaaagaaacaaagaaagaaagaaagaaagaaagagagagagagagagagagagagagaggaaggaaggaaggaaggaaggaagaaagaaagaaagaaagaaagaaagaaagaaagaaggaaggaaggaaggaaggaaggaagggagagagagggaaagaaagaaagttagttctgacacatgctccaatacgagtaaaccttggaagcattaggctgagtgaaataagccagtcacaaaaggacaaatactgtatgtttccacttacatgaagtacttagaataaataggaaaattcaaacagacagaaaatagaatgttggttaccaggagctggagggagggagggaggaatggggagttattgcttaatggatacagagtttatgcttgggacaatgaaaaagttctagaaatagtgatgatggttcataggattgtgaatgtatcagataccactgaattgtatgcttaaaaatggtggaaatggtaaattttgcattagctatattttacaaaaaaatactgatctggaagcagctttgtcttagtttgggctgcggtaacaagttatcatagactcggtgacttcagcaacagatatggattgctcatggttctagaagctgcacactccaaggtcaaggcactggtggatctgctgtgtagggagattcctgatttccacttcctgatttgcagatggtaccttctctgcatcctcacatagcagaaagagtgatagagctctctggcttctccttacaggagcactaatcccattcatgagcgctcccttcttacctaactacctcccaaagtcctcatcccctaacaccatcatcttaggagttagtatttcagcctgtgcatccaggagggacaaaaacattcaggccataacaagactaaactgctcaccagtagggaacttgggagataagccctggtacttctgcagcaggagcaggcacatattttctagaaaggaccagacagtaaatgtgttaggttttgttggacattctgtttctgccttgtattttcttttgtatttttttaacaacagcttaaaatgtaaaaaccattcctcattggagggctgagcaaaaacagattgatggcaggatttggcctgtgagctgcagtttgccgaacccctggtctatgctatgaaaaattatgtcaatgacaaagaattcagtacttttataggtactgatactgaaagatttccaagatatactgtgacaaaaacaacttgcaaagtgatatagtgtggtgtgatcctatctatggaaaaacagaaatacatatctttacatgtgcgtatctgcctgccaatgaactgggcttgggtgaaggtcaaggcgaatttctgtattaccttacatttttgcacttttaataagcttaaaaaaattacttgcacaattcgaaatgattgttgcaaaaattatgaaagaagggattcagatttgcattacaacagtggttttctctacttgggaaaccccgtgattctcttcgtatgccatatgaccccagtgttctaccctgacatccaggggaaatgctttgcccagagaagtagagaacatttttacagctgatggctctgagaccttaatacattcccataatgcccagtttctacttctttccactcctagacataaaacgaagatatttatggacaccacagggtattgcaattgttaattggggcgtccttggagggctgagagggctcagtcctgtgcttttctacagaatgcctctctctaaggaaggcactagttaatgattggctttaattttatgacctggggcccgggtgtcaagtaaacagttttacaaccactttaacataagctagatgggcagatgacttactgagcctctcccagaacacaagcgcatttcttttctcctttcctactggcagggcaaaaacccaagctctttcatgcgctattcaagcaggctgcagcctcaggggtgatgcacgaagggctcaggtcactgtgtttctttggagggtgaaggtgaacagtcttctctgatatgctccttctccctcggggtaggtgtgtctgccatgcaaacaggttgctcatctgccaccaggcccctaatgagcccaaccctcctctgagcagcttgctccaaccccagccctgttgtcaagtcaggcccctgctcataaaactctctccagtgagctgtgacacacatgaaggtacacatttacagggaaacctgtaaatcagggaaatcgggacagccccacaccccttctcaaggccacttaaagtagcaaaggtgcggcactggactcagccttgcgttggtctctgcacagactcaggtaatcatcgctggcctgggaggacgcggccctcgaagagttttggagcatctccacacttagatgttcaatgcctcacgtctactgggaggtatgtgaagtctttgaccccacttctcagattggaaaccaaggctgtgcattgatgttactggccaaagccacagaatgtgggcagaagtcagactcaccagggagttttcctccagtgtgaacagcttttcctcctctaaagttccttcttaaaggaagcaggtaaagaaacagctatagatgtgtgcactaacctctctgaaatcactgcaattcaactagttttaaggaacaattacgactctactgctaagctttgtattttcatttgtaaattcataatagtaatagatctccctgaaactctggtttcaaggattcaatgagataacattaggggaatacttagaatacataatgcctattaactaaatcatggtggctgctatttctgtgattgtggaatttgaattcttgtcatctttttggaaaccaatggggaaagaacattgagaaaccatggcccactccattgtgtgtgtggatccctgtgcctgcctcagtcctcaggaagcccagaaaaggccagcagcttccttctagaaagagccaaaagccaccttcttggaggcatctggtccagcacatcccacgacggaatcagattaaatccttcctgttaagttattcactttccctatgggctgttgctgcaaatgctgcgttcaccctggaaggaccaaacgttttgctttttcttgtgttgtaggttgtttgcttttgttacaaaataatccacaccagctgtaataaatacagaaaatataaatgtagataaaaactccatccatatacctcaataccatccacacagataaaagcagagaactgatgcatgtgtgaccttccagacaaatgctgtgatgtgtgcacatatacatacatgtgcacgggcatgcatacgtgcacctgcacacatgcatacactcatgcacaggtatgcacacagggacacatgcacagagacacacacatggacacagagggacacacacagacacacacacggaaaatttgatttcctactgtctttccttgacaatattaagattacacatgcacatcatcctaagatttgctttccacatttgaccatactggtgacccttccatgtcagagcacaggatcaaccacattctttctcactgctgcaacacattccatatgaatatacctcaatttatataactgcttctgcactcctatacattgcaatataatgacccccagcgatttcctaatacaaatggtgctgagatgaatccttttaaaatacatcattgtacattcaagctgttatttctatagactagaacagatctgtaaacttaagaaacggactgcctgcgtaagaactcttcactcgaagttaaagtcttccaaagaaatgggcacgccatgttaaagcaaccacctgcctatctctcacccagacaccagcctctgaaggttccacttatctgaaatattcccataggctgtctaccttaattagcctcaacagaaaattatttgacaagttacatgttgtcataatttgcttgagactttgggaagaggtgacataatgttgtgacaaggtactgtaacacttggaaaatcttaacgccccatgtgtgcccctggtcacaaattcccagcccagcctgggctcacacgcactgcagcatctttgccagagacagattgcatctacttaggtcgagctgcagttttcaagaagacactaaatcatgacacattacttctcaccttgctgaatttgtgaacaggatacaacatatcttgccttcgaaatagccaattagaaatatagaaagaagggccaggtgcagtggctcacgcctgtatcccagcactttgggaggccaaggcaggtggatcacgaggtcaggagatcgagaccatcctggcaaacatggtaaaaccctgtctctactaaaatacaaaaaattagccatgcatgatggcgcgcacctgtagttccagctacttgggagtctgaggcaggggaatctctcgaacctgagaggcggaggttgcagtgagccgagatcacgccaccgcactccagcctggcgatagagccagacaccatctcaaaaaaaaaaaaaaaaagaaaagaaaagaaatacagaaagaaggggattaatgttggagttcccataagctagccatttttccctcctattttagaagaataaaatattccaattaagacttagtaactaaataatatggtctagaactatctatgaacttcacggggttctcccactcaccctgtacaacaacaaaatgtgctttagtcttcacaatgagaattacagaagcaactgcatcagacaaagacagggctgcattttttcttccaacccactaggcccagattcatgcgtggaagcttaatttattttgcaaagtgagtgtcatcacagcctgaagtgtttaaaaatcactcattccatctaattagatctttcagtagctccgaaagttaatattataccaattgtggcactaatgagcatcatgatcttgtgtgtcacggagacaagccccacatagatacctcgacatctggacatgtgtgtggtatcaggagagagcactgttcaacctcatttttgtgactttattgaggggcgagtagcccatcttaacaagatcacatgatgtctgagtgctgtggccatttagcttgctatatttgaggagaaaaaggaaaaaatgtataaccaagcatgatttaacagaactgacatgccatttattcaacttttttcaaaaccccatgttttcagcattgacctcattaaaaaacctctaagcagggtgaggatctaggtcctgtatatattaataaaatcatggattttcacggagccaacttttgtctggcatcagggaacctaacaacactctgtgaaaacatggctcatgtcaatttccagtgtaccactgttaatatccaatttcgagagcacgtcttttatttgtaaaaacaaattgctagaaaaagcatttgccactggcattctgtgtttctagttctaccatgatcctcatggaaaatttataggaaatatttttctaaattcctctgcatcccatatagtatggatgtttattatatatttagaaacatatatggcttgattaattttttaaatgacagcccatgaatttaaaatgaggttactctggggtgcacaaattaaatagcttccaatgaaggattaaaaatggaatgtaaagagggtagaagctatggacctactgcaacacacaagcttgaattatctttagcatttggtgtggggccctctcaatcaacagccacaagccataaagctgcagcctctgtaggttggggaggtaataagaatgactctgggaattaaagcaaggaaattaaggacatttgcaggagagtttaaggaaaccaatcgttctctggaattattgattgaatgataagtcaagtaatattagcatcaagtagagagtgcacacccaacaagtaaataaaagaacgatgcattttaaatgcaattgtttcaaagggcactaagcaatcactctattaaatacaatgcttggtgctgaatgcatttaaatctcccagtatgtctgtgtgtgcatataaagtattgcaaaacagaaccaaaagcaagtcgaataataatgtgagcaggtcctgagataacctgtcaaatcaggctgctgatatcacaatttgggtgacagcagatcatgaggcaaagccataaatgaggtaatgaagtattagcagaaacaaggtaaaatgtgtgaatataaaagccacgctgtccagggcaggcgctcagagtaattaacctgtcaaggatgcagctcaaggaagtgtttgggtccaacgtgatcaaggaacaagccagggtccccagcctgccagcaaggggcggcccgctggttcgttgtgcttcactttcacagtgctttttgcctttttcattttttaatgacctgctgatatttaaaacttaggcgatttcacttaaatataaaaaaagaattcctggcttttcatagaaatttcagatctaatagctctgtggctaccttcccacaccactggaattggctatagctacagagaacgggagaagggggtttttctttctctgctctgcacacccagtgaattctgcttcctcacacaccctgaccccaggacacttgattttgagacttcttgtgcaagaggaccccgaatatgagtgaactatcttccctaataggccagtagggtttaccaggatatggctgagcagttgaaaaacgcagactttccaggccccgatgaatttatatgcagaggtggctttctttatatatcattgtaaagattatataaagattataagagtttgtgtgctccatgctgtatgaggagaaaatcaatttctcattcttctaaaaagctcacaatgcaactggaattttccctgaaccaagtaaacaaaagtgtcatttaacttgaatggggaaaaggtgttagaaaaagtctttatcgttctactttcaactttcctattattatctaagtttgactgatttttcaaggggtggctacgatgaagccatccttcggagtttataatagaaacgctatataatttaaatcgccagtgaaagactggagccacgcagttaggaaactgattttgttgttgttgttgtcatttcttttctagggaaggttcagccctacatggtgcctacttcttagcctgacaatggggtatccagcgggtgaagcagttgagaagtgggcagtcgaccttggctttgccctcctcccctgatgtagaccccgaggtgccccactgaagatgcctttgggatggaaaacaagctctttgaagattgtttcccaattcttacatttgaggccaggaggaagttccgaggtagcctagagccctgtcactgttacaagattccttcccagaggactggtctacacatctgggagaaaacaggcttcagaaaccatccactctgtgatggctgctctggcttattgacgtgcaattgatctgacatgccttattggcatgcagcgggtcattccacacaccccgagtgcggtggcaggctgcatagcatgcttggcacactgcccggcactcaggtaatgatggatgcgtgctggcttaactgctgagaagccactaaataacagccattaacgggtgaggagttcaaatctgggtgctcctctgtgtgtgtcggaaaagttatttggtcactaagcctaatttataaaattagaatactgacttttacattgcaagcattccatgagataacatgcaaagtgtagcccaaggcaagcatataactattattatttgttgttgtcgttgttgttattattattaccacaagacataatctgatttcttatctttcaaggacccatctttcaggaattggccggacgtgggcaaataaattggatatctattgatcagcactcctgccaataacttggaacatcatttcccagtcaatgatttcacaaatgaagacactgcaaaatagtgttcgttgcctgtccactgtaggaactgattctaaatgttcacttcagtgtgcctgccagaggaatacaaacccgatacgggtgtactggccacgcgttggagagacgaaaaggcttactgaacattcttagtaaatgtgccatttgttcctggtgggtgaagcatttcatgattcatgcaatattgtaaatttttattttctttacatagacttggcttttattgtaattcctactcttgggggaaggtaatatggattcatccaagttaataaagcctcttggagataacatctccaggactcaaggccattctcagggtacaattaagacatttgtttgcttggtattcaccacgaagatccaaggttgccatcatgctaagtcactgcatgcatttcatgacatgaacacgagctttgcataccatttcaggcaggacagcgatcacagtggagtcaccgttagagaagctgagaggttctttggaacaaactacaggccatgaataagagtaacaagtgtgccacctcattagaaggtagggcagttcagaggacaccgagccctggaccaaaggttcaggccacagcatgcatcactgcattccacacaccctgctttgccccggagcttggaggtaaatctggagagaagaaagagccgtggttttcttttcttttttttttttcctttttttctttttttttttttttttttgagatggagttttgctcttgtcgcccaggctggagtgctatggtgtgatctcagctcactgcagcctctgcctcccaggttcaagtgattctcctgcctcagcctctcaagtagctggaattacagatgtgcacaaccatgcccggctgatttttgtatttttagtagagacagggtttcaccatgttggtcaagctggtctcgaactcctgagctcaagtgattcaccagcctcagcctcccaaagtgctgggattacaggcataagccactgtgctgaggctgtggttttctgtttgggattcaaggcattcaccctccagaaggaagctgagatatgtctcttattaaatgacatacactgtccctcgaacaccctagtggtatatatgaaacgcatcccaggaactaagaaaagagtcttcatttgacagagcagcacacgcatgagactcatcacttgcatacgcaggcatcccacccacccaagcttggcaggctcaacagagcacattttgtccttataattctccatctcaccaacaaatctccgaaggtttctcctgttccttggtatatagaggttttgatccgagattccagctgatgacttcattcttgaagaatgagcactagctgtttcaggttttctggaattcatgtaatgcaaacagtaattcatgtaatgagctattgcttcctcaatatgtttggaggaaataacctttcatttgaactccagaattttctcctgatcagcaaagagctggcgtcagccttccgggtgaacagtattctgttaagttgaatgccccaagcccatgcccctaagctccctcacgccttacagagatgcaccatctgcttccagacattccaaaggggacgtctgtgcctcctgggttgttggtcatatcttagccacttctgtgagtgaagaaatatttcgaaagctgccaagtccaccttcctcattccgcatgtatgaagaattcattgaggttgctatttgtcaagaggctgcaaacatttcctatcatttgtctcaatccatgcttctgtttcaacacccgtcacagaaatccacagtctcagttgctttaagcccctcatcctcctgccttttccactcaaaccagaattatccatcatttattttctaagaacagaaaagatgtcactgccattggtgctatcagtttctacaaatatattgtgtaccttacaggaggacagtataatttttggccagcggaagtttcatcgtagcactctagctataatctcaaattagtcaatgcagcagagcacagtctgctatgcaggatgaggtttatgttttcagaatacacatttgggcgtgtaattgttgtaatagtagtgtgaagttttagccatgtctgtgggtgttgatttgttccaatgtagtatctaaatgcttacattacatcatggctgtgcagcagaacggagacatgtaatagctatttggaatatgtgttctgtctagatagctgaactaaaaatcagtagggtttttttgttttgttttgtttgcaggggagagtaggatgttactgattttaaaatcattattagtcttcattttgcttttcaattggctggcaaattctgtcttcattcaggtccataacaattgtcttacgtacactccttcgggagacagcaactgggaatttaactgtgacaaggcaggcgtcagaacggtgtctttccaaacagctcgagtctccttgtcattgaaaatctcaaactctatcgctgtaaaaaggtgagataaaaaaggcagctggcgcatccatttccatgtgttttatcctttcataatacctggttatttaaaaggagcatgatcaaacctcaggactggtacctgacagcaaccctgagaaagttaagccccttccagacaactcgaataaagaagattattcctattaaggtatcaaatcatatcaataaagctgcgtggctctcagatgtcacggatggaactacgggagtgattaaggggttaagctggctctccccgggttagtggcatctcgtcagcggcatgagggaacctggttgctgggaggggccctttccctcccaggtcaggccacccctgtctatcaggcaaatacaataggaattacttaatttaacaccgtttcagttctaattgaatcccattttctaaatcctgaataaatacaactgctgcttcggtcaaacggagagaaatagccatcttttaatgactcccctgtggatttaatgcctattctatccgtgagaataatgattccaacatccctggaatacattgaagggataatggttatttaaacatgccaagtctttatagagcagataaatattttaatttgcatttatgaaaatcaaaaagtaagcatgggagcaggaaccagtttgtctacttccccagtcatcaaaaccacagagtggcaggttcacaacgtgggagcgcaagagaaactcggcaccatcaaccctaccatgattgtttcccagtaggacctgccgctgacccacctgcccccaccagcgagctggagagggctcctgaaaccagcacatctggccacgcccttgcctggcttttagccctcactggcttcccattgctctgacgctggcgaccaaaaggacctacttagttgccatggcccctgctcggcccttgggccttgacaccaccacatccctagcactctgtgttctcccagtgcccggggccttggcatgtgcctgactgtctgtctgtgacctcacatgcacacgctccacaatttgtagtcattacgttcattgatgccattattcgatcaatgtttgcctctcctgccaggcagtgaattaggaaccttgtctattttgttcaatattgttatatgtaaaaatgtttatttagaaatagaatgcttgttccccggtgccacatagaaatagcatttgaacataaatttaattgttttagcaaagcaatttttattttctgcagaaaaggtgctcattgcagacggaataatggtgagaacagaccggaagaaaggaaaagcagatgtgtttattccttacgcattttgtctttgctactgtgtcctgtctttattggctggagacagaccttacactctaaactaaaacccgattggctaacagtttaaaacatttgtaaataggttaaagcaatggaaagataaaggaaaagaggaagcttcttaccaaaggacttagaaaaggaataacattcctaaataaggaaggggcataggctgggagctgagacatgcgtgtgagcacgtccagcacagatattttagctaaagtacaaggacttagaatgcactacgggcctgtgagcatgtctagcataaaggtagtctttaaaagaaactattatttataacacttatgatttattctttaacaagaagggaaactttgaagaggaacttcttattttctacaattttttctttttttatagtttttttaacctttttttaatatgccttggcttatttgtttaacttttggatgtatggtataatataatatctaacaaggagaaatatacttactacagttgctagagagctaaggactgaggctatggggtttttttgtgtttttttgttgttgttgttggccaaaccactttttgagccgatttgaaacagggttgttaatgccagaattttttgttaacctatttgataaggcagtaagttcctggcaagcttttgttatgcttttactgggagcagtgttgtttgggataaaagtgcaatattgagttttgcttataacacaaatactacttttttttgctaatattatatttaaatttttttttagggcatttgactagtggattttaattgtttagctatttttttccacagtatttttgatatatttaacaaattgctgctggttgtaatgaatgtagtttatttaacttacatttgtattaattgttacttaccaaagcaacattgacttaaaccctgcagctatttgatttttggctttacatttatttggtactttatggggaacttgcatttaaatagacatgggaattaaaagatctataaggggctgcttcttttgaggctttttttatttgcctatgttgcatttttttttttttttttggttgatgaaatgccagggtaaaaggatagctaactgaactacagcataagtactgctttaattatttggccgagtgttcagtcaaggttttttctaatactaccatatatttgcttagggatggctaaaggtggactgaagggttagctctcagaagtgcctgactttactgcattttgttaagtctttaaggtacacccaattttccccttgtcattggagacacgaggtaaaactggtcttggatgatggaggctgaatggcccatgatggctgacctgcagggtactgcactttaggaaacagcagagagaattgggcacagtttattatcctaggttgcaggattttgaaaaagagctactatgcagctcctgtttggttgattagagtggaaaagggacaacccggcctttggcctcctgtgcgcacaaggatgactgtcgcttttattaagagtgtgcacaaaatatttaattcgtttcagccgggcatttatattttgataccttgttttaattgctattgtttgccttatgaaacaatgggccacgggaggtacggcagcataggtaccgcaaggctgggccacaggtaccacaggggctgaccatgggtccggcagggctggaccacggaaactgcagagtttcactgtgggtcatgcagggctggaccatggctattgccttaggttgttttacttttactatagaggttttggtctccatagtaaactatagtcttgttatagtaaactttggtcttgttattgtgtttgggaggagtgataactaaacaagcattaaaagtaataacttcaggagagttagatttagttacattaatagtaagttggggagtcacggaaagaaaagaaaaagaaaagatagattaagtttttttagctttaacttggtagggcttgaccctggaataatagcctatgactctgatggcaatgaccctttttgacttgggtatgacatgtttatttacatttttgctgtgcaaacggcagtcttggtggttagcagcacaagatagggtccttcctaggctggcttgagggtttttttttttttaatcttttgatgaagacatggtctttaggctggtgctggtgtactggaaatgttaggggtggtacccatgctaaaagatttttagttttgagggaagggaaagtggaagataaattaagcatataatttttgagaaactgatttttgttttaaatgtggggatattagtagtggactttacagtccttagtgcctttttgctgagattttctttttttttttttcttaattcctactgatgttgcctttgagggacttcttggggctttccaccttgctagaactttgcacattctggggctggaggccctacggtgatgcctcccgctttagccccgcttagcgttgcccaggggccgccatggcctggccctcttttgaggtcttggcctccctgcggcctttacagctccagcgcattgtgttgttgggatgagaggtcttgtgattcacctgccacctttggacctggctcctgcctgagcccctgctgtccggcccttggccttgggctgggctgtgtggtttcaaggctgcttggccccctcccttgcacagaagtggttgtttgcagttaggaacccccaccggcttgtgctgtggcttttttaggagactctggaggtggaaactccttggtattaaccctgtgctggagggcccctaatgggttttttgatgcagttggaacaagaatttctttataaggggtttggataacatttttgtttggtttagcaatattttttttttaatttttaaaaaaattttttaaaattagcttttagactaaagaaagcaaaacaccattttatatttgacaatgctttttgtgtgattttataccagataagttaaattttacttttatattagtgtgttattaatgttaaacttaattttaataaaaccttatagacattatttaattttaatgtctgactataaggtaagatatttatagacttttttaaccttttataatttttgttaaagagcagttagtgcttagaaaaaaacctgttgtgcttttattttaatgtccagtttacagaaaaactggatgatacctttttaactttagctaatatgtttacacatagaattttctttataattaacattttaaaacttgcttaaaccttaaaacaaaatatatacatttttaaacttttaatgtaggtaaaaatttacatttttatgcttttttacaatttttgtactaaaagtattttttttacatatcttgcacataaactgtttctttaatagttttacatttaggaggcctaattacttttaaattatgtaacattttttgcatacattcccctttgtaacttttttttacgactttcacagataatttttaacatgccttaacttttggccttccttttacactatttcttttcatagttttaccctctgtgcctttctttgatctctgtctttttcagtctttctcttacttattttttccttttttttttaatttgagctttctctctctctctatcatcccttgtttcctctttctctcacacttacttgctggatgggatccgtgcgactgcagtgcaggccccaggccaggccgctgttggcccagaggcttggcaggtgccctgcgcaagttgcacaggtcattaaccttgggccagagggcccctttgtctttcctccttatttttatgtttactgcccttactgcgctgactttgaccttctcctttaaagtactgaccttgccttcttttttttttggcattcctgacatgtcttaactttttttttcaccttttctagaaaactttggaactttgccaaaagatttttgctttctgtctctgcctgtctctttctctctctgctggtttttccctgcctctgccagccgcctatgctgctcttctcccttctccttccccttccccttcccctagggagtagccggcggaagtggagcttagcctctttcttcccccgagaagaggggaaagggaatttttaaatatatatatatatgcacacacacatacatacacacacacacacgcacacatatagacatatatatacacatatatacatatatacacatatatataaacacacatatatatataagcatatatataattatttttatctactggaggtttgtgtgatgttcagtcttcccctgatggggattttttttaacttctttttaacctctaagacatcccgaccagggaatacctcaccaccacccaacccccgcaccccctcaccccccgcatcccccaccaccccacccctccgtaccccccaccccgcacccccaccaccacccccgcagcttttctttcctcagtcctgacgagggaatgctttaccgcccctgggggttctttcactttggtgtgtcccaaggaaggaatgctttactgccccacggctttttccatagtcccaaccaccaaggaaatacttgaccagctcctccagtctttttccttccttggctcatgcaggaggtcgcctgggccacgtgatatgtgagggtcctttacgccaggttgctggtcagtttccttccgtgttgctgagagtccgggtctgtttgtcacaccgggagggtctcgattccttacccttgaggccactgcagtaaggcagtgggacgccccctcgggagagaggactagagaccaccccggaggagaatgtatccccgtacgggccaccatttgttatatgtaaaaatgtttatttagaaatagaatgtttgttccctgatgccacaaagaaatagcatttgaacataaatttaatttttttagcaaggcaatttttactttctgcagaaagggtgctcattgccgatggaataatggcaagagcacaccggaacaaaggaaaaggagacgtatttattccttacacattttgtctttgctactgtgtcctgtctccattggctggagccagaccttacgctctaaactaaaaaccgattggctaagagtttgaaactttttaaaataggtaacagtaatgaaaagacaaaggaaaagaggaagttgcttacgaaaggacttagaaaaggaataacattcctaaataaagaaggggcataggctgggagctgagacatgcgtgtgagcacgtccagcacagatattttagttaaagtacaaggacttagaatgtactacgggcctgtgagcatgtctagcataaagttagtctttaaaagaaactattatttataacacttgtgatttattctttaacaaaaaagaacacttaaaaaaatctttttattttctgcaaatatagtagccccagcatattttgtctaacacatagtgtactctcaatatgcttctgattgaataaattgtgggatcaatagacaaatcgatcaatctatgccctactttgcaaattctattgaatctaaaagtaagccatttggtcaacctatctctattactcccgtaacacagtgcctctaatatttagaattacatcacgttaattagtttccaaattttctttcctatactccctcttttttccattccttacaattttcagattggttaactcagcacaatttacctaagagacggtggactcttctgctggtgattttctgtgcctggattcccttgctggggctgctaggaacccattgacacgagtctcgctctcaagttctgtgtgcaaagcatgctggggccagggcttgccgaggacacgggccaggtgggagtctccctgcaggcgtgccttggttctcttttacaccctaagtctcccttgcttgccacagcctgaaagtggtctgcaatccccactatgttctccaaagatgaagccacagatattacccgtctaagctccagtgggtacctggggagacgacccatgagctccaaagtgggcagccagactcttccttcagccagcagcccaatcacatcaatgtggagaccagggacaggcaggggcactggtgtgctggtaaatgtttaacatccagctctcaggagaggagggtaggaaagccccgatttgtagcattaaacaattcctgtggtgtaaatactttctctgtggccctcggcaagcttaccaatgtgacgtgactggaagcagaattgggaagaggtgtgaactgtcacgtctgatgggccacgggaggtgcttcagcaccacaggtactgcaaggctgggccacaagtactacaggggcggaccatgtgtcctgcaggactggaccatggaaactgcaggttttcactgtgggtcctgcagggctggcccatgagtattacagggattggtcacaggtacttcagggctagaccatgggtaccccagccttgcaggagaacatgaagaaacatcaagttctctcctttccctttcataccgactttggttgttgttcaccgtacacttcccaggatcatatctttatcgcatttattctgatatctaaatttatcttattgatttatttgcctttctgacacccatacagtgacgatacaaactctaggagaacagagacattgcctttcctactctgaggaagcctgggctactatccaacacatcgagtttactcattacctttgtctaaattttcttgttgaatagaatatggttccagcctccggcaatcagaaccttcaggaaagaactagattaagcttcatttctaggtgctcatgaacctgtgttcttcccggaggtctttggaaatgcttatctaaacctagtgaaatggcttttaaaagcccgcactccagtttcagaaaacagccctgcagctctaaagtcttaatttcaaatataagcaaaattccagaacatctgagcaaaacagttccttcaaaataagaataatagtcaaatatatcaatataaaaggaggtcttaacattcacgaaacctcaaattcctagtttctctggcgtttgaataatttttcaccatagataaaaaaggaaccagagcccaggaaatggcagacctgtagcctgactctcatatttcaaacaccagcctctctcacactggccctgttcctccggtcagcaaaagagacgggcctttacaatagaaatccaacatttacatgcaggcttggggatgagaatccagtgcccaggacctctgcaaagcccaactacttcaccttcaagggcgggatgccagatctgctgtctgccttgggtttcctcaccttaaagagcaaaaagaatgcatcttggctaatgtagagtgaagagggtcttgggcttgaaagttcaccagcaagtcacatggatcgtgtttgttgttttgctttggcgttgtgtgcgtgtgaacgagaggacgtcctggccatgggtgagacaatggggagcactgatctgggactcagctgtaacccaaacatgggcagttaccagggctggaagcccagctgccgatgcaaaggccaagtatggccagcagaatcatgcacaacacagagatggcagcctcagaagagcccgcatctgtgtgatggggcagtggcagcagaccgcaggctggtgagcatctccatcggcccctgcctggctcctgctgccccagccactgtgtgcagcagtggagcagagctgggcctgtgctcaccagtgagtgctgcagtctgaaattagaactcttctccacaatggtaatttctacctgcccctttacaaatcgagctactttttaaatgcatgatgtctccaccctctccttctattcacagactccctaggaagagggatctgcccccatggcagcatgccccaactatgcctctacccttaagatgccaggggcaaccaccctattatcgtatcagaaatagcggcgctgtcagccccattatcccgggaatgttgctgaggatgtggggatgggatctctcactcactgccgattagagagtatatccatggaacacttttagattattttttgtttgtttagattgattttttaaatttttgcagagcagttggcagtatcatttagaaatcagaatgcccattggcccaacaattccatttctaggaaatctatctacagaagtaataccaaaaacgagcagacacacgtatatggataatcatcatgaataatggaaaatgggaaaaaacctaaacatttatcaagaatgggctctgtcatttggggcatctctattatggcacattctgtacgctaatccaatgatgcacatctatctataatgacggcaaggtgctcggggcatttttaaaatcagctttgttgaagcataatggccatacaataaactgcgtatatgtaaagtgtataatttggtacattttaacacactcatgaaacaatcaccatcatcaagacaggaacccatccgcacccgaagtcctcccggggtccctctgcactctctctccccaggcaaccactcgtctgctgtcaccaaggattaatttccctcctctagacttttatacagatggaatcgcacactatgttctcaattctgtctggcttctctcactcagataattgttttcaaatccatctgcctttttgtgtcaatagttcattgcttttgtggctgagcagctttcgggggtgtggatggaccacagggttttaccagtttttctgttgatgtgcatttgagttgtttttagtttaggacttataggaataaagcagctatgaacgttcatggacgcatttttgtacagacttctacttctttttttgataaatatctaggagtggaatagctgaaccatgtggtaggtgtagctttcactttttaagacacttccaagctgctttcctgtgtggctgctacatcttgctttcccaccaggagcaggagcttgcacccaggacgtgtttagcttctgtttttttttaaattgatttatttattttattaacaaataataattgtatattttatcatgtactcatgatgttttgaaatatggaaatgttgtagagtggctcaatcaagctaattaagggaaacaaataataaaagaaaatatctaaaaaattcatatgtacatttacataactaaataaaatagtacttaaatgtgtatataagcatatgtaaggtgtgtgcctgtgtctatgcacacgcataagatagacgcactcatatcaaattcccaacaatgctcacctccagaagatatgatggagactaatctttgtttttgagacggaggtgctttaaaaaaaatagcaaagttgctttaaaaaatagcaattttattaaaaaataattaattcataattagcaaactctgcatttttgaaagaccaaaatttgagcaaatgctgtggacaccctccagaaggcttaacaagcttggctctccatagttacaggtcctgatgggctctgctgttgggggccacaccccaactcccaacacccccaagtctttctggtcagcaggctcagaaacaagatgatgcactcaaggaagtaacatgaatcgatggtcatgtacaaaggaccagacaacccagggctcctccagcccgaacattctgacagtccacatgtctgggctgggattcatcctaactctcaggaaagaaagactcctccaagaatgaggatgcgggtagagcaacggaccctaccactgttaatcttggcatgggggtccatgcactaggctgaaagcataggaaggttaccaagacaatctttgaaatctctcatgcgtttggtcaaatataaatcaagataaaatggacttaaaattatgactcatgaaaaaaaatggctgtctccatgtgtagtataaaattaaggcgtcattttgagccagttctataaatttctctaagtgtacatgcaacttactttatgacttttgtaaattagtatctcaattttgtcttctgtaaaatgaacataatagcacctgcctcataggcttggcatgtgctaagtcaagtatctaaaaacagtgctgagcacatggcaggggctgtggcagcactgactgttggtgctcatattcttcctctctaaagtctgatcctcttttccacaatataagattaccatcatgtactcactcacaaactcattcgttcatttacttatccaatgtttattgagtgccttctgaaagctggtggcaatgtctcagctagttgtgggggatgaagtagtgaacaagggaaacctccaagtccaggagaagagagaggcatgaagtggaggcatggacgctaatggaacacaagaagggaatctgcccagggacagtggcagggagctcaaatgtttgggaagccaacaaaggcgtacagccctgaggagccaggactctatcttaggaagagcacttggcaacagagtggagaagagcttggaggaaacgcaagttcacaggtgatggagcagttctaatggaaggtgctggtcgttttgaaagggagggagatatcatttggagaaaaaccagatatgagggtgaagaagaaagaagaatcaggaatggctcctagatttagagcttggacatctgagttaactggggaggcatggactggcttggagagcaatggacaaagagcagctgtgacctgtagggaagggtaaagcctgcaagaggtgatgatttggccattctgtgattaaaaaaaaaaagatttagtgtttcatggaagtctaccaaagaatccttcctacagaaacaaatgtgcttgaggcatttactgagttactcaaatagttgttacttactgggagtaactacctaagataaaacaaaatggtggctgcataggttgtcatgtatgtgaaaattcctttcatatgcacaattccacatcgtgatcacccccactctaggaagacttggagaaatcaagaatgtcaacattgtggttcaactagaagtggtgaatcacaaatttgaacccagatctccctgattctaagcattattgccattctaagggcaccttggaggattcttgagaatttttttgcagagaaaggaatcttcaaggtaatggaaaggtaagatatcatttgcaagtttttggtgtgagatacaattggtaggtgttcacaagtcttggcagttaccctctaacagtttcttaaaagatgcgccaggcagatagccagataagaccaagtttctatgataaaacttgagtacaccgagagatggtaaaatacagttcaaacaaagtggagtccaggacttcagattttgaagtgacaaagagatctggaaagggtactgcttccacctttacaatgagtaaagaactgaacaaactgcaaaccactgacttttcctgatatcataaaagaactgaagttgcagagcaaacaaaacgccccaaacctggggagagacagatgcttgcggagaaaaagaagaaccaagcattcatttacttggagcagatgttgcctgattctacatacactggtaataaaatccagctatgaattcttaactaattgcttaaagccaagtatgggaaagtgtaaagccctaggactagaagcatggatggggtttgcgctgtcttacaagcatgcccactactgtgtgcttacagcatatgcaacaacaaaaaaaagtgaaatccacgacagctatggcacaaaggatgagaaaaggacttagaaacatacagaggcccttgcacttcatacaaattagtatactattatttgaagaagaccttagattttttaaagtacatattataaataccagggcaaatattaaaacatcaagtgagataaataattaatagaggaagtgaaaagaaattataaaaatagtccatcaaatctagagaagacaacaagggggaataaacaaataacaaatgaaacaactagacaacagctggcaagatggtagttttaatccagttatattgataaccattttaaatgtgaatgatctaaacacagcagttaaaagacagagattgccaggttgaatgaaaaaaaagactcaacaatatgctgtccacatgacatttattttaaatttaaagacatagaaatatcaaaagtagaagcatggagagtgatagatcttgccaacacaagctacagaaagctggagcaactgtaataattccatacaatgcagaatgtagaacaaggaatattatcagagataaagagtgataatacataattataaaagaatcaagtctcccacaagagacaatactaacaacacagctttaaaatacgtgaagcaaaaactgatttatttgaaagtgacagcaaaatttacagttacagctggagccttgaatacttctctctcagcaattggtttaacaagaaggcaaaaataagtacagataatgataacctaaacagtgtcattgaccattttgacataattgacacctagagaacactccgacaacaataacaaaatacccttcttcacaactgcaaatgaaacatccacctagagagactgtagtctgggccttcaaacacaccttaacaaatttaaaagcataaaaatcatacaaagtatattttaaaagatcaaattaaactagaaaataacaaagatatctgaaaatctctaaatatttggaaactaataatgtacttgtccgtaaaatgtggataaaatggaattatctgagaattaaaattcttttgaactgaatgacaataaaaatacagcatatcaaaatgtatgggatgcagctaaagcagtgctcagaggacaatctatactactagaggcttatattagaaaaaaaaatttaaatcaataacctaagctttcaccattagagaaggaatttcctcactcaggaccctctgcggatgtcgcctccatcctcatcaggaccctccatggtgtcacctccatcctcactcaggacactccatggtgtcacctccatccttactcaggaccctccatggtgtcaccgccatcctcactcaggaccctccatgagtgccacctccatcctcaccaggatcccctgtaagtgtcacctccatcctcaccaggaccctccatgagtgtcacctccatcctcaggaccctccatgagtgtcacctccatcctcactcaggaccctccatggtgtcaccgccatcctcactcaggaccctccatgagtgccacctccatcctcaccaggatcccctgtaagtgtcacctccatcctcaccaggaccctccatgagtgtcacctccatcctcaggaccctccatgagtgtcacctccatcctcactcaggaccctccatggtgtcacctccatcctcactcaggaccctccatggtgtcacctccatcctcactcaggaccctccatgggtgtcacctccatcctcactcaggaccctccatggtgtcacctccatcctcactcaggaccctccatggtgtcacctccatcctcactcaggaccctccatggtgtcacctccatcctcactcaggaccctccgtgagtgccagctctgtctaccctcgggaccctccatgagtgtctcctctatctaccctcaggaccctctgtgaatgtcctcgccatccatactcccccctcttagacccagactgtttcagggttggacactgagctgtggcccctgagcctagctcttctccgagcttctcttgggcacctctctctcagactaggctcagctccaacaccagttcccagagcccttcctgttcactgtctggtgtctcacactcacacctgctcacatgcacactgactcactcacactcaaactcacatccacagttatagagttcactgctttcctcacatccttctgcagtcaggtggccacagtcaccttctcccacacagcctcacacactcatgctcccagacacgttcacagatatacacaaactcattgacacactggcaaactcaatactgtgcacacctgctctcaggcacacactcacacactcatccacacagagacactcactcctgtgcaggtgcacacatgacacgcccccccacccctcccttccggcaccccatgttccctgtctcagggctcacacttcataagcactcatggaagttgctactgcagggtggatgccaagacagggagcctgcacgaacaggttcacagcatttgttgtttatgtggctgttgcttgtccttcactgaggtccagcatttagagggcagggactctgtctctggggcatctctttattccaggacacagcaagtacctgccacatctaggaactcagtaaatatttcttgtttaataagagagggaggaagcacaggctataggatacaaaaaaaaagaagaggatggcaaagaaggacgggtgctgaggaagacagagagatggaccgtgttgagcctgcgaggtcttggcgggagctgtcctgggcgtggttgttctctgatacagtctaatttcgatgtggcctcggtgtggcatactatgggaccacagcttccccatcaggctgccttactgaggtggaactccacaaccttgatttaatagacagaagctgcatctgctccccacaagttactagcccacacgggcactgctcagagttaagaatgtgtttccatggtgaccttctggtaattaactttttggaaggtgtccaagacagaccagcctcctccagaattcagcaccacctggggtccttcccgcccagggctactctttctggaaaatcagcttgcatgtcctggccgtgggaagggtcacctgatttcctttatgccttttgaggggctcactcttccttagaccaaggttgtgtacttccttcttttaccttgtttatgcagcaggaccccggatccaacctgtcttctgtgagctttatcaatagactagggtttgttgtaacaaactgggaagaaacccaaagaaaggggtgggatgggctagtttctagccactttcatgattagaaagtgtggcttggaaaaggacagacaattcctttctggcatgctgtgaacaggaaagtgagagcgtggtagagtactgcagacgtatttcttaccatatcatatgttcttagatgggtgtttttggccaacattttgaatgtctttgtttagcttctttatgcttgaggcaaaacacttaactagagagtgataggggcattgttgaaacaatgatgataaattataaataggcataattatcctgtggcctgaaaagagacctgcacacaattaatattgaaatttggcaagtgcatgattggaagaaagatgtgatttcttaagtaaggaaattttaggaatgcacccttatgtagcactgtatataatgtcttctggagggaaaatgaaatcccattgctgatcaacggcatgggtgcagggtttggaaaacacccacggatccaaatcaactgctgctttctcccctttctacacgcagttccagcatgatgctgaaaatgattcaaagattcagatgggaatatgtgtactcgaggaaacagtcctgtttgcagcgaagagactggcaagctgttcagagttctatgcaccatgagctaagcagatccagttccccggaagatctggtacagactgtttttatctggagagaaacctaggctgaaacctagcgtgctgagcaagtttactagcataaagggagcagcggacaaaatttgaagatactggctcagggtgagcaaatgcgagctctgtgcacttggagagaggcgctctgcacagcccaagggtgtggaagttaactctctggtcttggagttagactgtcttgctccatccctcaagtctgccaatgacttgttttgaaccttcaccagtttcacagcctttcagagccctgtctccatgttcctgtagcactgatctccacctcctagggttgaagatgacctgagatcagcaaactgcctagcatgtagttggcgctcaatccacagcagctcagaccccctatagcagcctttggtgcctagcttctcagatccccatccagcagctaggccctcaaggaatgacacaaaaatgaagtgaatgcttcaccttccgtcaacatggcatgcatgcagtgggatttaacttcccattattgaattaaaaagaaatggcccagcagttccaactccctgggatcctgttcctgaatcccagtccaactgcgactcaggtacccaagaaaaagactttcagcatttgaacttggacttaaaagcctttaagaaaattagtgttcctgaatctgctgtttcatcaggaggatgaggggggatcatgaggatcaccccagcatggcagctctgaatcctcccaccacatggtcagggcatgtggatcacaggatgagctacggctgccacggctgcagcgtagagctcagcccaggtgtgtcctgccctcccctggtcctctccccgctttagaagttattccaaaaggcaacttcctcctcccacccccattaaaagcagctgttttatttctgattgactcttttttgagcaaattcttcagaatcaagtcacttgaagggtaattgtttctgaaaaatatcttgtttttgcatctgtgcagctgtggttattcaatcactggaacaccatctattgagtggcatatttatcgctgactttttcccctccttttattctggttagacatggtttggttcccttagtttggggatgggttgtgttctttaggtttgcgagttattttttgctgtattgtattcctaatataaggtataagaaatttctattgtaaaaactaaataattttaaaactaaacatctcactgaaaacatcttaaaaatttgacatgagtccattaactgataagatctgtgttttaaggaaaaatgggtcatctcggatgtccaaagagcaactttagaaacgctggaaccacgggtcaatcagttataggaaaccctctttagggaatagttgtcatactcatgtacctatttaattcataaccagaaacatccgggaggcattcattgtcctcttgaggctgtctaggaacagaggttccatgatctcacctgagtcatgatggccttggggcatccctcttgagtcttctcacttctaaagcatccttgtaggaaaacagcaccctctgaaggacagtgtccccgccccccccccccccccagccccaggaagccagggcacttgtcctagcacaatcaggggcctagcatcagaagtggggcttgggaatggagcgggaagtgggtagcggggaggcccaggtgtgaaagcatcgtccacctcaccgagtgccctttgactccagaccaccggcgtggaggggttattttagagacaacacaccactagctccccagtcacggccccatcttcgagaacatgccccgcccaaccccatcagggccaccacatggcactgagccctcactccccactgtgaggatcggggccagcaggtagaaaggagcagtctgtgggtaagagctggcacttgggaggtcatcaacgcaggcagagcgagaaacagcagaagaacaggaaggaaggaggggagtctgggagccggaggaaatggccccttttcccgacctctagctcctgctcagagtctggtccagctccacatggctcgcacagccctcgtcctactgcactgtaactgcttagctatgtgtctgcctctaaattataagcttcacgaagtccagcatctgtgtctgtcttgttcatgcttatgcccagaacatagctccagggctggcacaaagtgactttgcgtcaagtggttttctacaacagaggaaggaggagagagctttcagttaagagggaaacaggccaggtggtcggcaaggctgttggggggcaggcaagcccaaaactggggcttagcctgggaaggttcttggctttgcccaggaaagaattcaagagcaagctggtggtagaagaaaacagcctcactgaggcccagcgttacagctctgtgattgcccctgcagagcagggccatgtcctaggcagtgtgtgcacagccgcagctttatacccacttaaaatgacatgcaaagtaaggaaaaggttattcagaatttcctagaaaaagaggtggtaacttccaggtcattgccatggaaaggggtggcaacttctgggtgttgccatggcaatggtaaactgacatggcactggttagcagtcttatggaaaggtgctttcacctctcccctgtttcagccactcttcaatctgctccagagtttgagccccacttcctacctcaaggggaccccagggtggtggtcacagcgtatgtaagaattataatcacaattacagttaaacattcaggtaagcatattagaaggcaaaaatatttcctttttcaacattaggatacagtttgtttgaaaggtctagtaatgcaatggttacatcgcaaactcatgctttaaatactaagtaccttccccatctctgtctgtaaaggagccacaaagattcccacgagacagcctggtacatcttccagtcctctaggtttttatcttaaatattagtctataataacatgagtcagagctcctcagggagaaattgatttgatgtcccaggaagaggaaagtggagatggttctggtacatcttattgccagaaagcagtaattatttccaaattttttgggaatcatatcaaaagaacaaaaaagctagcccaagaggctcccagtggacatattatgccaatgtaaccatcatcaagagagtgataattatgggtaattaggactagtcactttgtttaaaaccacaggtctataatgctactcaaaatgggaaaagttattataaagtttgcaaagccatctgtgaaaggttgatgaggaattggagatgtgttggtgccagattataactccacagattacttgcgggtcagtaggagaaaatatagttataaagcagaggaatctgactgcgcttaccacaacccggtgacaaaacaacatccctcatggtgaagcagctggacgtgtgtgtcaggatgtgacacacgtgatgtacaaagatggtatcatcatcaaagtagacaccaaaacgtgtttacctgaaccaagtgagggccccggacctaacatccagcctgcagaaaatactgggtgtagaagggctggctgtcacgagacctgatcagactcaggcagaacatggtgcctcctacaggatggcagctcagctcttcatccaatcacagtcatggcagcaactggcggggcagggcccgtctaagagaaatgagacgtaatctgtagagaagccagctagacacaggggaaatggtaaggcagctgcagcaaaatgtcaacacttgtccttatttcctcatctacaaaatgggggtggcatcaacagcactcatcttagaagattataaagattaaacgtaaaatgtttagaacattgtacattatcaactaaaggttccaaaagctgttaggcggtgctggtgagtgttctttccatgcatgaaatcctctcagacattaaaaaatctagactcagaccagtgaatactgtttggagacaatgcccccacccccaacccactgcaaagaaaaaaaaaaaagatgaggatgaggatggtgtattgaaagcacaacagagagaatggcagccctctttctacaaatccagtaaacagaatctttccaggagtacatatggtgaaaagtcaggtataattgcatttcatacttggtaaattgttatttatatgagaaaatgcaaaagtgagtttctgtatcagttaactattgctgtgtaacaaaccactccaacataagtggctcaaggcaataatcagttatgatcactcacaagacttgggtttcctggcaggctctaggctggtctgggctggatttgctgcagtctgtggggacggctgctctaggagggcttcgcctggactggtctcctccacgttgtctctcatcacccagcaagcctggaactggtacatcatcattccttccacccccccccttttttttttccagacagagtctcactctgtcgcctaggctggagtgcagtggcatgatcttggttcactgcaacctccacttcccgggattcaagcaattctcgtgcctcagcctcccaagaagctgggattacaggcatgcgccaccacgcccggctaatttttgtatttttaatagagatggcgttttgtcatgttggccaggctggtcttgaactcctgacctcagatgatctacccatctcagcctcccaaagtgttgggattatagacgtgagccactatgcccgaccccttcctccacttctgttagtcacagagcaacccagattcaagggaaaaggaaacaaactctatctctagatgggttgggctctagagtcattttgaaaagggcaccaataaaagtgcaggggaggattggggcagctgcagtcaatcaaccacagaccatctgggccgcactgacataaccagacatgcagatgaagaggactttcttgtaatgcacaaaggtattttcatagctgggcttttctctgtgtatctttggaagagtacctacaaggcagctggtaaaatggacctattccttagtggtagcatgaaaacatagtaactaacaaagactaacaatcattcagagggcaggccatgttctgccttgatggctacacatggtctcatttcatcttcattgccatctcctccacatccattccattctcttcatgtgaagtcgaggaagtttaagcaccaagaattttaatattttgtccgaggtcagttagttgatgagtggtggcactaggcctacaactccccctattaatgcctgggcccacgaacttagcaatatatgtacacgctacagcctccctgagtggaaagcttacaggtcacaggtcccaaacaccagagaaccaatgataatctttgatgaacttttcagcagacacaaactgaataaaataaaacaatgtaggaattatttttaagtgctaattctatctacctattgatgtactttatttatatatttacttacttatttataattttatcctgaaattgtgtccttcctactttgggggtgctgaaataagcttttccttaggcagtagtgggaaaaggagaatgcggttgcatgtttgctgccattactgttgtgggttattgttggtttgagtcctggtgtttgtaatgttctcacctggaaaaaaaaataaaatgttagtaacatttacaacctctatgagatatttgacatgtgccttaccacccgtctgatcatactcctttcccagagctctgggtttctggaagcatcatgcggcggccaggcacctgaccccacctgaggctccagcagaggagcagtgagtgaaactggctaaacccatctgtgagctccagcaccctggcaatagaattcgggtcagatgttgagccagttcacatcaaattaacctgagggtgttccaggaagacaggggcagagaggaaattgtccccaggagatgcagccatcatgggatcctgagggcagatggctttgcaatgaagctgaccctcgaaagcagagtagagatagaaacaaaatgagccctcagtgtcactatagaggcccctcacaccagccattaactcaggatcctcaggtatatgagccaatatattccactgattgtttaaaccagagtgaacttggttttcagtctgcaaagagtaaccaaggagtcaaatacgcaatttgggaccccctgggaaagttcatcctcccttcttcctggtcactgaggaaaatatgaccctgtgtctcctgtcattctgataagaacacatctaatttaatcgaagctaagcaatccgggcctttaaaaataattttattgtttcactgctaccttcttctccttagtcacctctacctagatagagtgggaaccaaagttgggggtgcagccattttggcacatggtggaattgtactgtttgccactgagacttccttttattttgactgcaggcggaccgcccatcttatgcaattcttcagggacacgtctcggatctcagcccgtaagttataaaagcatgcagttccaatgggatctcaacctctaagttatgaaagcatatgcagttccaacccccattgactccagttcccaagatgttgcttcagttcttggatctcaaaatcactggcaaaaagtgacgcctcatctggaatggagctgatctgcagggctggtggtagctgtaatgatcctgctcacatctgtggcgaggtccactggacttccatgggaatcattagtggaaatcatggcattgcatacctcagtaacaagaggctttatctgctaaagaggagtcagagacggctgccctcctgttatttcatctgcctccgaagatatgtccaggtgtgtaatgacaaatttgttgcaacaggacaggcgagccggcactcaaatttgcctgcatcggttacttcacataccttttctccttgtcttggagcaccctgttcagtgttcctcaaaagctgagtttttgataaagatttctttctacaacctccacagtattccagggactgagacatacatgtcaaatattttaagtcgtttacaaaagtattgagatttcctaatgctaaatgagcagactgaggctgtgaatggcaaaattacccattgcatgcagcaattcagaggctgtctgtcacgcatacgagacaccatggaggggaggactggctgatttagctactcaatagatacatccaaaaataccacttagaatttagtatttattttccttggaaaagaataacggcactgtttcctgcagggaaatttactatgcctttattctgtttaaccaataataccttatgggctcttgaaaattatattcacttaaagatcaggcagtcattttcatttgtcctgacagaaaagcatagattgcaactgggtctacagcacccaggttcagtcagcgttttgctggaataacagtggccacaaccaaactcattgtcactcaaaaccacctttctcttggctggtgctgatattttgcttgggatgatcttttacatgggaagccagccccagccagtctttactcttgcctgaggccaaggcctcttctccatgtctgtagtcacgcctctctcttgcatgtgtgccctctctagacctccatggcaagtggactaagggtgacctttagagcaggcgttagggatttctgctctaaaaggagacccatggcccatggtgacacatagaatgcttagtaaaatggcattcctctaccacaggggaaaaaaaacccaggccttggaggaacatgggctatgactatggcctcttttgtttctgtaatgcacatacacttagtaatttcctgatataatttttcaggtttcaaaacatccatgagctccagccctcttcatctcttgctggagagctcattctctcattctctggaacacagagctatgctgctcgtaggcactcaggaaacacttgctgaatggatttaaagtggataatacagggagaattatcttgtaaactgagcctgctggtttcaatcgccatcacatacatacacaaaatgacagacattgaagcatgtttgaggaaggatctctactcggtgcagacctttgaaaacagcctggtgcttgggtgccaccccagaccaaagaagctggaacgcctgggactgacctccaggcatgggtgcttttcagaaacaccctgggtggtttcgcaagcaatcagggtcacacaggtggtcccagcgttaattttggtgcaacaagtatgagtgttaaataacaatgcatcttattcaatactttgaccactcaaggagaagacctcaattcaccatcagtgagtcttccatctctttacctcttgttcatgtgccttttaatatatagaccacaagctcagagcctgggcagataatggcatctttttcaaatttcataatgttttttctgggctggggatggtggcacatgcctgtaatcccagcacttttgggaggctgagacaggcagatcatctgaggtcaggagttcaagaccagcctggccaacatggtgaaacgctgtctccactaaaaatacaaaaattagctgggtgtcctgcctgtaatgccagctactcaggcggctgaggcaagagaattgcttaaacttgggaggcagaggttgcagtgagccaagatcacaccactgcactccagcctgggcgacagagctagactccttctcaaaaaaaaaaaaaatggctgtagagaatacatgcagttgctattgagaagccgattactgctgcctaattgtctgagagtttaagcaacctgccttttctctctaggtgcttgaggatggtctcttatctttagttttctgcatttcgctaaaatgcagtttagtgcatttttactaaatgcattttctgcattttcactaaaatatgtctaaatgcatgtttgtttctttgttttctcgtttaggattaattgcacttcctgaatctgtgaattggtgtcttccatcagttctgaaaaattctagccactgtatcttcacatattgtccctactacctgctcccccaattctggaactctcagtggatacattgtattttttcagtccatgcctcatgtcagtgttcttctcacatttttttttcattttttcatctttctgggctgcgttttggatgatattctcagatacatatttcagtaaactaattctcttttatctgtgtgtaatctgctattaaacccatctgttgagttttcattctcatccttatctttgtggggtttttcttacacttgtaattggctctttttgtaatttgcttgatagtttcatattctcttgcacttttctcatattttcagtcctttatttatttaaaccaactaaacatacctattttatattttgcacctgataatgctaatatcaaacatttcacatagttattaaaccatctgttgttttctatagctcttgttcacggtgcctagttttgctacgagtttataatttttgcatgagtttgtatttatttggagcttcatctatgggaattccctgccatctgtattgaaggtgaaattatctccttttgcttctgcaggttccccaggacattatcagccaggactactttaaactaaattctcagtttgcagttttacagacttggtggtaatgtaaattcagtccataaagctgatttctcaggctataaattttcggggtagattttccctctcgaatcttcctcaaggtttgagacagacagttggtcatccagtcccctgaggggtggatttatttccacttcaccttacagtaaggttgtagccctttggggacccagttttacttgggaagagctcctgttagactcaccaccttggacagatgctgagctttttcctgtctctcccctgagcccctggaggctcaagactgaagctcaaatgtcctcggttgtcaaatgccctcaaggtagagccagccttcctgtgcttgtcacctccttgggttcccagtaataatcagttgctggcttccaagtgcagcttactttcttgctggcacatcctgcattttaatgtgtgtgtgtgtgtgtgtgtgtgtgtgtgtttaacctagcatttttagatgcttttggtggggggagtttttacatctggcccatcattccgccaggaggcattctttttaatagctgcataaaattccacattataaatggcccacttttaaaatcattgatggacggatagtcagtttgtttctggactcttttatttgtttttgacacaaaaaagaaccataagcatgcatctgtatgagaatgtgccctcatttccataggatcagttcaaatatcaggatggttatgtagtgatatagattcacacagattcacaaacacatccagagtatttgacattgggtacatgtgcctcttcttttcacacaacttgttagtttgaaaaatttcagacctacacattagttcccaggcaagtataatgagcatacaccaagacacacacacacgtacacacagagattcatccatatggttttatggtatattctgttttattgaaccgtgtgaatggtgcagccgtcaggacacttcattactaaatatatcaacaggtatgtcccaagaacaaagacagctacaacactgttatcacacacagaaggcacaacagttatataagtttatgatctaaaatagattggaataaaatacaatcaaatttctccaattgccccagtaacacctgttacaaccattttattttttattctagaaaacctttaggagcaattaaagatgacgaattgcctttagttgcaagattcccttaatcccctgtaatctggcacagttctcctgactttatttttattttttgtctttcttggcatggatcttgtgatgagtccagggcagttattttgtagacaattcctcaagtgtgtttctctgatctcttcctggtgatgtggttcaggataatcattcttggtttgaattctgcgcagggtgtgtcccttcccagtgcaccccttagaggatgcatgaagctaccttgtcccattattcattatgttaagtttgatcattcagtgaagggggtttctggcattttctcttttattaagtgatattttgccttagtaattaataataagttatggcgctagactttgaggcggcatggagagcctcttcaacgtcattttccacccaatgatttcaacatccattgaagatttttgcctgaatcagtaattattatggtggctgtaaagcagtgatttacaatgtcttttattcctctacatttatttgttggtgtttcttctgtaaaaaggagctttcccatgtaacctaagtttttcaaatgtttgtgtgtttgtttatctgagtgcggactcatggatttctttctctttttttcttatttgataacatataacctattccaatagcttttattttgatgctaaaattgctctaagccctggccagtgggagccccgttgagctggctctggtgtccttttgttctgtctctacaactttagacacttctttatctttgtcatatcaagatgttcccatttctttgtgttctgtcctgttccagcccttgcacgcatggggtcctgttggagccctgactccttttggtggggaatggtttgtggaccccagcatcttgcccctttgtggaactctctcctcctggacttctatggctgggctctccccgtctccaccctgcacttgtctggtgagattctactggcctcttagatagtggtccttgccatggtccttccctggtgcctctacgatcctcttccagcctctgtctccttggaggacttcacccctgcagtggtttccggaattattgatacactgtcaactcccaggcggctctgtcccattctagaccatctcctgacttcctgctgttcacaactccctactccaccatcacctcaaagccctgcagacatttcaaactccttcgcttcacttccaactaaaggcctcacaacccaccccgtctcccacacttaaacacatcacatctttctctgctaccgagtatctctagtcaccaaattctgccaaatctgccccagaaatgtcttgtgtgccatgttaccctctctaaccccaccattgctatggaaataccaactctcacttagatgactgtctctcattccaaaatccttgccactggcctgatctggtttgccagaatttcctcctcagaaatgaatgagatgggatgtggggcatgggtccctcagacactctccacgtcctccctgggagcaccctgacattcgtagccacacactttcacctggtcatctggctatgtcctttctaaagggatacaagcaaaaggaatcacatgggacttcgaggaaagctgaaagactcaaccgaatagactttgtgttgtccttccttcttccagcctaggctgtgactccagcagtccccccggaccatgcgctgatcctgaagatggcagccatgtgctggaggcaagggcaaaaaaaggagctggaacctcagacgacaccttggaactgctattttctgccatgtcctggatgcttcttcttcctgggggatatcaacattaatcttatttaagccactgctttggggtgggggaagggtatgcctcttatcagcagccacccctaaccccagctgacagagcacagcgtagcagtggggtgcatcaccttggcaaccagccactaactgcgttagaattagtgcctggccttcatcaagtcacttaactgcttagaggttaatttatttcttctcttctccaccacacgtctcttcccactctcattcagtggctggtttctatccatgcttcaatatccaagttaaatgtcaccttgacagaagacaggcttctgggccatgttctgcatctgggtctggacatggttacatgtatgtatgcactttggaaagtcacatctttaatgcttataaattttgatagctatctgtccacatatagaggacaatagctgcaggtataggtgtaggtacaggtgtgggtgcagagacaggtacagatgcagatgggatgtagctgtagctgcaggtataggtgtaggtagagatgcaggtgtaggtgtaggtacaggtgtgggtgcaatacaggcaaagacataggttcaggtgtagatgcagatgtagatataggtgcagatgcaggtgcagatgtagatgcaggtgtaggtgcatgtacaggtgcaggtacaggggtaggtacaggaataggtgcaaatgtagatgtagatgtaaatgtagatggaggtgtaggtacaggtacaggtttagttgcaggtgcagatgcagatgtagatgtagatgcaggtgtaaatacaggtgcaggtgtaggtgtagatgcaggtgcaggtgtaggtacaagtgtagttataggtgtaggtgtaggtgcaagtataggtgtagatgtagaggcaagtgcaggtgtagatataagtgtagctataggtgtacatgtggcgtagatgcaggtgcaggtgtaggtgcagatgcaggtgcaggtgtaggtgcaggtgcaggtgtaggtgcaggtgtaggtgcaggtgcaggtgtaggtgcaggtgcaggtgtagatgcaggtgcaggtgtaggtgcaggtgtaggtgcaggtgtaggtgcaggtgtagatgcaggtgtaggtgcaggtgtaggtgcaggtgtagatgtagatgtagaggcaagtgcatgtgtaggtataagtgtagctataggtgtacatgtggcgtagatgtaggtgcaggtgtagatgtagatgtaggtgcaggtgtagatgtagatgcaggtgcaggtgtagatgtagatgtaggtgcaggtctaggtacaagtgtatgcacaggtgtagatgcaggtacaggagtagacgtaggtgcgggtatagatgttggtacaggtgtaggtacaagcgtacacacaggtgtagatgcaggtgtaggtacaggtacaggtgtagattcaggtgtagatgtaggtgtaggtgcagggacaggtgtagattcaggtgtagatgtaggtgtaggtgcagggacaggtggagacgcagctgtagatgtagatttagatgcaggtgtaggtgcaggtacagatgtaggtgtgcagtttcaggtacaggtgcaggtgtggatgcagatacagtcatagcttagggaaaccatccctaaccatctcaggcagaatcagcactttgttcatatctctgaggtttgacatcttccttacatacctgtagctcccgggtcttagtgagtggcaggtgagctccacacctctagggccagccacattggggcacacacaaaacacccaataaatgtccataaacacatgaaggagctggaattctttatgtgcttgtgtgtactttgggcctttaatcatttccatgtgcctaattccagttgcatgaaatcacacttcctttattgagtctcaaatgattttcttcacattgtacaaaaattcctcccaaacttgggaattgggatttggaaaacaatctcttctcccttccttcattgccttcatggctgaatatatttaattagcatcctcttgacctttccatacctttccatgtggaaaatgactcatctttgggcctgtcttatgtggaagcctatctctctgctcaggctgagtgtcagagggacagctttgtgggttccctgagccaggctggccagcttcacagccaggcttccagtgcagagaacaccaccctccctggcacttagagaagaaagaagacagaggaacaatgtgcattagagtcaaacgtgcttgtcttatgtcactatcaaggtagggttcccaggattaacagaaaagaaaaaaagacatccagttaaatttgaagatcagataaacaaataatttcttggtatatgtaggtttcatgcaagaaacaatttttttttttgagacggagtcttgctctgttgcccaggctggagtgcagtggcacaatcttggctcactgcaacctccacctccctggttcaagcaattctcttgtctcaccctctggagtagctgggactacaggtgcctgccaccacacctggctaaattttgtatttttagtagagatggggtttcagcttgttggtcaggctgatctcgaactcctgacctcaggtgatccacccgcctcagcctcccaaagtgctgggattataggcatgagccacaatgcctggccaagaaacaatttttaaatgtaagtgtgcctccacatatatgcagaacatacttacactaacaaatttgactgtttagctgaaattgtaatataatttggtgctctgcatttattgaacaactcaagatcatagtgcatttcgcctaagccgtgtcactgcacacagtgacaaaacacagtcctgccatcctacttattcctcacaaaagtccagtgagatgggcagagcagatgccattagcttcatcaaaatgaagatatttaacaaaactcataagactacaagtgtcaaaacttttaccgaaaggcaggcttcctggctttaatttgaccatctccacacctttaccagtgacacgggtgaccttcctgcagtaaaaggtgactcacctgcttcctgttgctcattactcaagtgccatttttccactgggaagctcctggccccaccctgcatccacgtggtcaggttgatctcagacccaggtagatctctgtcacctaccggcaaaagggtttggagcatccacttccatatcaaaatgtcaatctttagaaatctgccctgggcagaaatctgacaaatattttttaagcacttgctatgttctagggactgtaacaagcacagaggaactggcagtgagcctgccctctgccttcgtggagctcatcttggtggtcaggcaactttttaacatgctacggccaggctgtctgctcagattaagaggacattggagtgactgtcctctggtctagtcactcccctcccaaatatccaaatcccaaagagccagttctgcaggcgacatcactacttcccatctgagagtgggtccaccgcaggccatgtgggctgtcagagacagccctgtgtacttccctgtgtgccagttatccctgagtcgtcttccagcactgcccccagatctgtcccttctcccacagccaccgaaggaataaatcttgcttaaaacgcgtacatcccagcgctaagaccctggcaggcgatgcaccctacctactcccaagatttacatcctgagtgtgaaagtcaataaaaactaattaaatgtttacctcatttccttggtaatgacccttacatgccactaattgtcaaactgaatctatatgcaggcgttccctctattggggtcagggctaatttctgcatacacaaagaaacatcaccgcggttatttacacctgcggccggtatgttctgtgcagatgctcgtgagctcatttccataggaggaggagttggtgccgagatttcagcgcaatgagcagggaattaggtatgcaacaaccatgaacaataatgagagccatgcacctaattccccggcatcatcttaaaaatttgttgtattaaataatgctgtaatgttatgttaagtaatgcaatgttaagtaacattgacttcagcctcattaaataatctccttaactatcatactggaaaactagtatcattagacaaatgctatttgtcatcagccatgatgtaattgttgcagaagattccatgctaaggaaagaattaataaacaaagcaccacaaatagagtgccctcctcaaggagcacaaaaagaaaagtgagaggatctgaaagataccttaggagagagagaactcatagcctcctctgttccttaaacccagaaacagccagatagagcaccaaggggaagacacccataaccccccactttagctctgtctccttttgagcctggctgaaaggcgagctctgggacaggcatcatcttgatgtgttgctggaacaaggaggcagcacgcaaacaggactcagtaggttcacttgccagcctttctccctaatcaaaggagactatggaaaaacaacatgagatagcttgagaactccacctttcccatgtgaaacccacaatcagtaaagggaaacacagggatatgtgcttgcctgttatgaccttattctcagaggtgatcatcagaatcatgggcatgcaaagatgtccacattctactctcccaaaccagtgaatagatgagattccatgatgaacgggaatgaaggctactattcagctgaccttacagtagggagatcacagtgccctatctgggcaggtccagtgtcatcccaggctccttaaatggggaagaggaaggcaggaggctcacagagaaagaactgtgtccctgggagcagagtctgagagataggatgtgggactcagcccaccatggctggctgtgaagatgcaggaaggggtctccaaccaaggaatgcaggtggcttctagcagctgggaagggcaggaaagcagaccctcacttagggcctccagaaaggaatgcagcccttcggatgccttgatttcagcccagtgagaccgtgtcagactcctggactccaaaatgagaataaatacatgtttttcaagccactacgtgtgcggtaattggttaaagcagcagtagaaagcgaatgcatctgtgattcaggaaattctcgggcactgcacagctgcgcagagtcaacaccacccaggtaggctcccaccacccacaagccagcacttctaatgacctggctgtgaaactcggccgcttcaacataaattttatcagcatcggagaagagagaggttcggcagagagaaaggggtgagcagacacgtggctgccctccatcagagctcagcatagggagggtggggccagctctctgcgtgccgagtgagcggctccccaagccgctctcccagaagagcaccttctcctcagccagcctttcttttgagcaattatttgcttgattttagagctgagaaaatgcatctttggatggtttaatacatatccagggccctattgagtaagagagctccagggcaggattggaacccagctgagttttggctcccaaggccaagtacagggctccatgattttaatgcatttccgtcagctagaggtaataaaaagatcagtcttgtttgggaaatgtctattaggttggtgcaaaagtaattgcggtttttgcaatgaactttaatggcaaaccacaattacttttgcaccagcctaatactttcaacttgaggcttgcttcttgtcttgtctctgctaagaggtcttaccaaaagggatcttgaagctatatccaaaatcagtctctggagacggataaacacgacagccctctatggctttgccaggctcatggttgcgagggctgagagtgatgtaatcctgagggcctcttgttattaatcccacctctcatgtgtacacagaaatgcagcccactgagtgcccagtggtgtatggctatcagctcactgagagccgttggccacgtctcgtgtgtgtatacacaggagtgtacaccagaacaaaaaggcgatagtagtatttacatatgagaaactctgcctgcattggcaacggcccattttatgctgagtagaagtcaaaagggcatgatgtggagggcagctgtagatgcgcaacagaactttccgtggtgctgggaaggttctagatctgcgctttccaacacaggagccgccagaaacacaaggcaacagagcacttctgtgactcttgggactgaggaactgaatatgttaattccgttaattcacttaatttaaacttaaatgcccacacatggctagtggctctcatagttgacagcatagaattgaagagatgtgttcgaacttataattgtgtataaatctcattttcctcatttaaaaatgtccttcaatctggaatatggtctgggtgctctgacacatctggagagatttgtgggtgctaaagtgaagccgaaaaatgtgagtccagagttaaaaatagacactccaatggctagtgggcttggaatggtcagctttgcagacaggctcatcccaacctccaggatctagaaatataatccttgcgtgaaaagccatgctcactcatccatcatcctgtcattgcttcaaaagacctttagtctggatgtcttgtatctatttctttggttactgtacctgtacctgtccatttgcatttcacatcatacctcaactggaatccatgccctgaggtagcccacatttcatttgattgcacttgtggaaccaattcaagtgttcattacagctatcaattaaaaatgtagttcatcataaaaaacatccttgaactttttggagttcagagaaccacagtagacaggtgcctggtggagtggggacagactcctgggctttgctacccaactctccctcaccagggtaacctgttctcatgtctcactctcagaatccagtggaagaagagccacagaaccactgtcatcctggcatgataaagaccactcgagacacacatttttcaacttcactttagcactcacaaatatctccagatgcgtcaaagcacccaggccataatccagattgaatgacatttttaaacgaggaaaacgagatttatagattgacttgccagtttccgcgtcttgttcctcatactaagcaccgtatatttgacacgcgttatttaggatgctgtctgattgggcttcccagggaaatgacagcctgtgattctctgccccagctacaggatccctgaaattagccatccttacaccatggaactgaagaggagaagattgtcttttctccttcagagcccatattctattccacacactggctatgaagttattttattgatcacaagggatcggaggtcctgttgaaatgttatctctcaaagcgagaccctgaacgagtggtgtaggcagctcttaaatatttgttcagcctgtggctgtgctttaagccggttaaagggcgcaggataaacacagcagacctggtgcacaggcttccagagatttcaggagacgaacaggggctgctacgcagggaagggaggctgcactctatgaattattggcgtgaatatgtcaatatttatcactcccaaggaatgacaaagaaaccaaaaccaaccagggctttcctgaaccacacacaatcacgtgtatacaggttcccaatgagtgttccttgagaaccccgtctaatctgtcagggctctttgtttacaattcaagagaccctgattccaattacattaagggaaaaaagaatttctatggaacagtggtctaaaccctgactattccttagaatcacctgcaaaactttgttcaaatgccagtgcccagagaacactatgatttggttaaaaaaaaacatttctgggcattgagctttgagaatcagtattttttaagcttcccaaggaattttaatttgcaaaggggttgggcatcacttaccagaagttctggaaagttctgggttgggggaagactggagaatcagacttaggcacagaagccctcaaaagccccagggagggttccatagccagggccccccacagggatgaatgagagtctgagggcagagctccaagggacaaggtgattgtgcccaaacaaggccaggccctccggctgccaggctggaggaaggaagctgctgccctcatccctcgggcccctgaatgggaagcaggcgtcagagctacctccctcttgcagctctgcacagcacaggcaagatgagttccccacagctaaagggaaaaatgggtgcttggacctccaaaatgttccctgcagccattttgtctggatgtcatcagatgcgtgatgggatagaaaaatgcatattagtccaaagtctgtgggctcatcaatccatgaacggataaaaaaactgtggtatatatatatacatatgccgtggaatactactcagccataaaaaggaacaaaataatgatatttgcaggaacctggatggaattggagacttttattctaagtgaagtaactcaggaatgaaatggcgaacatcatatgttctcactcacaagtgggagctaagctatgaggacacaaaggcagaagagagaatgatacattggactttagggtgtcggaggagagggagggagggggtgagagataaaagactacacactgggtagagtgtacactgctcgggtgatggacgcaccaaaatctcagaaatcagcactgaagaacttattcatgtaaccaaacaccacctgctcctctaaaaactattgaaatttttttaaaaagtaaatttaattaccagtgctacaataaaatttaaaaagtctgcaggctagaaacaaattgtataaggtctttgaacccaagaatggatataggatatgtttttgtttttcaaagtatttttaaaataacctcaaagcctcccatgccattgtgttttcttatttatcattttaatgattttagagaatacaattctgtagcattggatacatcacgatgctgtatctatccagttttgggacttggtcatcatcccaaaaggaaaccctgaacccaataagcagtcactcccctccctcaacccccagcccctggtagccagtagcctgctttctgtctctgtgggtttgcctacccgagcagttcattgaaatggagtcataaatctgtggcctttgtgtctggcatctctcacttagcatgctttcggggtgcgtgatgctgtagcgggcatcagtgctgcacgtctcgttatggatgaacagaatgtgctatggccataccgggaatataccccactcattgtttcttaagaggagcatcttgcagaagctgtgcaccatgacgctcatttttacaaagccggagacaggaaacacaaccaagcacatttgagtgactgtgtccagaggcagtatgctctgtcctcctgtctccatagccccacctgttactaaaagttcccttgcggtcactggcgtgacctgggccatgtgctcccagaacaggggaggccacagcgctacctgacctcgtcatgtagactgggtgtggacaaggccttgtttctcacaggaaacctcctggtgccaagagaaggggctgtggacacgaaggaggcacagatgcgagatgcccgaagtaaataaatgtgctccagctcccgctgaggctctgagacaggtgggccgtcaggacctttgtctatgactagtggcctggcttgagatcggggtaaccgtgataatagtgattataacacacacttgcacgtcgctctccagtgctcttcaaagctgtccatgaacccactcaatcctccttcccctaaagagtggggatgcaaattccattcccacaggcagggccatgcttagcaaagggtttccttgtaaacaaatgcccctcaagccaggtgttgaggcttttcaagggggcggtcatgaaactgatgcgcccaatctatccctccttcccccacatcaacatttcacacagttcctcgtttcagcttcaaaggcaaaccttgggtcttagataaattggggtttattttcccatcactgtctgtcccctctgcccatcactcagaggcgcgtgctgttcaccactcagaacatgcttaggatccacgcatcaatttcagtttaaaaatctatctcgcacatacgcagagcaaattaaatcagatcaagcagaaattgccttaaagggagttaatactctgactaaattcctgcgtaaggaggccccactaaccagctctgccacatttaacctagtatccgggtcagattcctgaacaagacagggctcccttgggtatctttttgagaactggccctaggaaatctcattcaccttacagctctggattccaatttatggcaagggtttgctgcctaccagaacaatggagtaatagcaaacgattttaaatgggtggatgggtttaggatattgtctattcaaaatgtgaaaaatgcatacagtgttttgggagcgtttaaaatggaggcaactattttcatagctagaaattggaaaatactcaaaagccaatgggaggatgtagagaggcaaattgtgaaaataaaatggatataaaattgccactggaaataacagttacaaggcttgggcagagcccacataaaaaccacaagaggggtccctgtggccagcagaataatgcctcccgccaaaaaaagtcacaccctaatgtccaaaacctgtgaaatatggtacctcacgtggcaaaaggaactttgcagatgtgattaaggaacttgagtgagtgattactaaagatggaggaaggggccatgacccaagaaatgcagcggcctctagaaactggatggattctccctggagccttcagcccagcaagatccattgtagtcttccgacctccagaacctggagttggtaacttcgtatcatttgcagtaatttgtcacagctgcaataggaaacttacacagctctggagtccactggccctgttcagatcacccacatgcaccccggcaccgcaaagcctctcctgcaatgtcaaggtcattagcatacctactccacaggaccattttacacattaagtgagatggtgcctggagaggcacctggcccatcatgcaatgtgtgtaagtcatcattagagccaaaaaaggaagtgctatggaccagaagatgcaaaatgttgaatttgtaatgatagcaaggatataaatcacgatcgtgtaaatagcaggcttatcacagagctggattttttgtagcagttacagatttgcaagttagagctacttcacttgaacgtggagctaatggtattaggatgctctttttcgttttgttcattcatccatccattcatacagcaagcatttgagaacccctgatgccgggctccgggctctgggctccgggctctgggctctgggctctgggctctgggcgggaccctgggaagccgcatgcctccatgctctcgctgcgtagaaccagagctctgctgattgaatatacatgaactataaagaggccccagatgaggagatcattttgggccctgcaatctcaggtgagtcctttgcagtctctggacgatgctggaaattgtggcgttgttctataatgcaaaagggaaagaggttttattcccacaagtctgagctttttgagatgggaactttctattttgttcttacttcccagagataaaaccaaagcctttttatttatgctgcacaagctcaatactttatttgcccttcaccatttttttgcaagtaaatttctttctccccgcagttttcccgcaaccggttggtctgtgattctcgcagtgtctcttttcccttgggaatgtgttcttccttcctccttgttagccaggcctggggaaggacgggacgcatcactgctgatgccccttctgaaaccccctgcaggcgcggctgcacctcaagcccggcggggcgaggacgctgagctgcagacagcgccacctagcgtccgagagccacggcgcaccggctgtgcgcatctctgggcgagactggaatggaaaaaaataggtctttgtaaatcaccacctcattttgttcctagagctctgtgtgtatctgaaagctatgttggaatttgcaggcagtagcaaactatgaattgaagagaattaataaatgcatgcctgtctattgatatgttcaacagaaccctaagaaattaccatttagacatcaaaaaatggatcaacctaatatttgtataggagaactagagaaacaaaggatatatatatatatatatatatatatatatatatatatatatatatatatatatatatatatatatatattcccattccagggaaattctgataatgtgggaggttttcgttgttgtcgcttgtttgttttgttttgattttttgagacggagtcttattctgtagcccgggctggagtgcagtggcgtgatcttggctcactgcaacctccgcctcccagattcaagtgattgtcctgtctcagcctcccgagtagctgggattacagatgcccaccacatctggctaatttttgtatttttagtagagacagggtttcaccatgttggccaggctggtcttgaactcctgacttcaagtgatccgtctgcctctgcctcccaaagtgctgggattacagacgtgagccaccgcatccagcctgataatgtgtttaagaataagtaacagagttaagcaatctggctcctgaacttcataataaagccattaatttatttatttttaacatgtttgttgtttttcataaatgtcggactcctactccctgtggctgcctcacctctgcttctccttcactggccaggtgcaggcaggagggagaaggacactccacgccccacgtggcccattggttcccaagccatctgccgacctcaattctggactctctgaaggaagaccttgattggctactcctgcccaatggggagcgtgcctccaggtcacatgtccatgctaggtcaatcagctgaggccaggaagggctgttgctcacctgcttttctcccctccctccctgccaccagcccagcccaggttgctgcactccccattgcctttgcgtgggttgctctgcggcctctcctctcagtgctgtctccttccggaagcctttccagatcccgccacggaatgtgggatgtccccccaaccacacagtctctgccaggaattctgtcttctgtcttaacggtgtttgccctgcaagccaggcccctctggcctgctatgtccctgtgctccgggtgtctaggcccacccacagtgttgataatgaagataactgctgcagacagggcacttgtccttgtcccatgcctggagagcagcacagatttgaacagacacttccccagagaagatatacagatggcaaatatgcacatgcaaaggcgttcagcgctgtcagccaccagggaaatgcaaattaaagccactggtgagacatgtcacatgcctattagaataaatgggaaatttaaaaaaaaaacagctaaaacaaaacaataaactggcaaaaccaagtgccgaggaggatttggagcaaccggaactctcctgcattactggtgggaatgcaaaatacagcagccactatggaaaacagtccagtctgggagcttcctatgaagtgaagcctacagagttgccacatgaccccacaaccctactcttaggtgtttatctaacagaaacaaaatatatgtctatacaatagacatgtgttgataacagaccttagtcctacttgtaatcaccaaatactggcaacaatccaagtgtcccttagcaaggaaaacaacaacaacaaactactgaagcatttaacaactctcagaactgcacactaaaagggtaaattttactgactgtaagtgatattttcatttttaaaacgccttttagggctttttctgtatcggcaaattccacgatgcctgtctgccccaactggtaaaacagcagcaaatttctagaatgttcttcttcctctcccaaccctgctcccattccccatgctgtgaaggagtctccatgcctagggttaggctgaccaaatgatggctcccctgcttctgagcaaggtgtatccaaggtcaagtccacaggcctgtttggaatctccaccaggcccagcctccacacacttggcacctgccgagcaaagggcatgttgagtgtccactctgagctcagcacggcaccgggggcctggggctaggctggcaggaggattccctagacagagaaggcaaactgcatcaaagttccagcaacagacctcctgcctagtaaaaccacaacagtgcacaaataaacattgctatacactcttgagaacttgctgccagccaggcaggggataagcactgtggggagcccgtcatccaatgttcaccacagccattattgtccccattatgtgggacagaaaactgacacggggttctcagttactgctggagggtgacctactgacattcgggcctgggccttgcactgccagagtgagtgcgtgagcccccaggaacactgacaaacctgctatggacttaatgtatacccctgaaattcatgtgcttacaccctaacccccagcatgacggtattcagagatgggggcttgggaaggaaatcaaggttagatgaggtcatgagggtggctctgtgaccttaaaagaagagaaaaagagatatctgtccgtgcacacctattgagaaaggccatgtgaggacgcagcaagaaggctgctgtctgcaagccaggaagagagccctcacctggaaccatgctggctggaacctcagtcttggatttttcagcctccagaactctgagaaataagcttctgacttgcatgtatcaaactctactcctcaccagctgcctgcaaaagacttattatcatttcttttcaaaatggagtgaggccaccttacccttgcacacttggcacctgccatgtctcccttggtccccgctctggttcttagtctcacactgtggtgggcttcattgagacactgagattcactttcatcccaagtgccctgctggcttctgacatctcccttgcttactccaaaagccttccaggtgtgttcagaggacggtgtgtggccccaaggcaactcttccaccaagaaaggctaatcttcaggagatctcttcaagggaggctgggcctggggggcaggcagcaaacccaagctgaaccaggttaacaaaggttgacccaggccaactcaaactactccatgtcagcccaggcccaacccaagctaaaccaggtcaacaggggtcaacccagaccaacttaagctaaactaggtcaacagaagtcaacctaagccaaagcaggtcaacacaagtcaaccctggataacacaggccaatcgaggccaaaccatgtctatccaccttggctgggcttcagcagcattcacctcgactaggtgaatggggtagctgcatctcacagacctgaggaagcaagaggtgcagcccagggcctttgaatgctcttgaaatgcatgcttctcccaattaaacactgcccattaaagggtctaatggggatcagcgtccaggagttgccaaaaaggccctgccaggctcaccccaacagcccacgcgcataccaacagcccaggcacaccccaacagcccaggcacatcccaacagcccaggctcaccccaacagcccaggaataccccaacagcccagacacaacccaacatcccagacacaccccaacagcccaggctcactccaacagcccaggctcaccccaacagtccaggctcaccccaacagcccaggaacactccaacagtccagacacaacccaacatcccagacacaccccaacagcacaggctcaccccaacagcccaggctcactccaacagctggatcatttgccagcacattgtgctgctggatcattacactgccagcgacttgacatcactttcaaagcactgcttaatttcaataattataaagcttcctggcctctgaaaaataagtgtgaagcctctccacatgcaggcagagccagggtggggagcagtgtcagagcttggcctcgccctcctgcacggcttccgttctccctaatttgcgtttgcccagagcgacaggaaatccagaggctgcagatgcgttactaacttgcaacccccgtcaatcatgatgaggttttacattattggatatgagtttggggtgaattattcaggtttcatattttgatgaatggggaaaaatgcaacacagaaccctgtgcatgtgtgagtgtgtgcatgagtatgtgagtgtgtgtgcataagtgtgtgcatgtgagtgtgcacgtgtatgtgcatgaatgtgtgtgtgactgtattgcgcatgtgtgtgactgtgtctgcatgagtgtgtgtgagtgtgcgcatgagtgtgagtgtgtgtctgcatgagtgtgtgagtctgtgagtgtgtgcatgagtgtgtgagtgtgcgcatgagtgtgtgtgtgcgtgcatttcagggaaacaaatgtcaccattagcaatccccactaataccgtcctgtgaagaattttctgcaaatctcttgtgcatagcgcgcaaaggggtgggtgctccccgtgagagatgtagcccatttttctgagagacatttgcctttccttaaacagcagtaacagcattatggtacccgctgctctagttgtggaacgactattttacaaagttttcagggaaaatctgtgtgctctcatgtattgtacaaacaagggtgtggcattcattctgtcatggaaaaatacctactattgcactgtctgggaaacaggtttttcaataataaacaagacctcacggccccccaaatctcatggtgcttcccggttgctatggaccaacatcggagcaccctttctaactgcctgatggaaacgtaagcagtggctttgtggttattttcaggcgagagctgagtatcaccagactgctccattatcacctctgataaattgggagactcgcctggtgacactgcgtctccactgtcccttccatctgtaaataaggggtggcctccttgctccatgacagctgaccttggcaagaagactgggcatctcaggccttcaaaaacactgtcatggagggatgtgattttgtttcacaacctttccttcctcccagatttatgtattcgctaatcacctgttcaagacacttgccttttctacctatttagatagcctgagcctgtgcctgggtcaattggctacgcacggcagttggggagaaacgggctgcacttgaaagctgatctctggtctccaagcttagttggctttaatggtgttattactacacctcctccacctcatattattaatttcatttatagcagaaccaataactcatccattcaaggcagtttgtcatgcatacctgtaaatagattgaaagtttgctgaagcatgccgggtaaacacgactgcagcgtctgcttgtctcctggaatcgcgccaagttctttagattcgggcgatattttttagaatgcatatgaatttatgctacaaaggcaacctcgccacctcagcccccgccgccgtcacccctgaaattccatttagtttcaattttactgctccagcccggctctgtttgagctgcaccctgtgaaggtgaaatgtcaccgccatcatttttgtattgatttagaagagtcgcctcggtgtgcaccggctcctgcgggtttctgttcagtgacctgagctgaaagtacttcgctctgtgcaaggtgagcacagggagctaagactaccccggaggaggagcccacggcagcaggggaaggggcctgcgggacacagggaggaacggtgagctcccacccacgctgctaccccagggggtctggagtcaccaggaagcgttcttggtgcagccactgtgaataattaaaggggttctgcatatctggagcagaacctatgcttagaacagaaaattcctttttattttaagactccatctaaaggaaagtaaaatggatgcctaggagtactacagatatatgttccttttgacaccagctctattgcccaaagtcacaaatgccataatgcaaactcaggagttccctgggctattagggagggactccagaccttgggctgagagccacagatcagtgtcactgtctcatggatgcagtggttttggccttcccagcctccgccaccgccgccttctggtaacagaccctcaactttcagtgggagatttcaccctcgtcagtgagatttgagtagactgactccactctgacctccagttgtggtcctgtggctgagacctggccaatcagagcatccagtcatcctggcatagtgacaggctcacagagagctacagagagagctaccaggttagtccagggtagctaccaggctcagagagagctaccaggttagtccaatgatgtctttttgccaaaataattaaatatgctcagctccctgctgctggggttgctgagaaggtagggtataaacttagagccactggtggcattcttgctactagaaggagaaagcttcattcaaaatgaagctactgtgagcaaatagaaaaggagacaaagcccacaggtcaggagaaatcgattgagcacctcgatccagccatgcctgaattcagccacatctgtctcggcttttgagttacctaagccaacatatatacttttttaaaaatcataagctagtgtgagttgggattcactcttttctggctgaaacaaagatcctgttgatacaaaggagagcccaaataccaagatcaggcgcctcgcccatcctcctgacacttgtcaagctttccttacgaccacaaaagtccgattctaaattccgggtagattttggattcctccaagtgctgtcctttgtaaaatcaatctctcaaggtattagagtgcaaagtgatccgattatttggaggaaatgtaccttttttttttttgagacagagtctccctctgtaatctaggctggagtgcagtaacgcaatcttggctcaccgcagcctctgcctcctgggttcaagtgattctcctgcctcaacctcttgagtagctcagattacattcatgtaccaccatgcctggctaatttttgtatttttattagatatggggttttgccatgttggccaggctggccttaaactcctggcctcaagtgatctgcccacctcagcctcccaaagtgctgggattacaggcatgagccaccatgcccgccaaaatgtaccattttaaaataaaaagggaacggcttttcctccaggagttttctttgcacctggtgtcactattcctccagcgtttccagcctccccctccaccctcttcttcctgctttggaggcagctggctcttcctccagcccacagatgcatctttactcccagctctccagctcatgcccttggattcagagaagaggtggatagccaagccctttgccccggggctgccactgtctcccctctatcagtggccttagataatgtgtgtgaatacacatgactcaagctgaactattaattttactttattttgcataccagagtcaatggcattttgaacacaacagggaaaatctatgtaaatgaatatgcaccattgtgtaaaatggctatgcaaatacatgcccctggaggtggctatgctgccattgaattttccaacatagggggcctgtgtcctgactttggtttagacctcagaaaaacagaaaatcagaaaatacttgggtttctgattgcagcaaagatgctgactgggttagtggccccttgcttccctttgaatggaagcttttcttgcttccagaagatgctgggaggtaaaaagttcgatttcagttgtatggtttgaaaacaagaactggattttgattctacgtaaatgtggctaaaaccttctgtgtgccctctgcccaaatgcgctacttggagtgacttccctctgctaattttggacttgatttattcttccttttctagttccttgaggtctaacattgggttgttgatttgagagtttcttcttttttaatgtaggcattcatcactataaacctccctcttagcattgcttttgcgtactccataagtatgttgtgttgggttttcgtttgtctcaggatattttctaatatatccccctttggagttgtcctttggcccattggctattccagggtgggaggtttaatgtccacatctctgtgagtttcccagtattcctttcactgttgatttctagtttcattccatagtgattggaaaaaatacttggtgtgatctcagtcttcttcaattagttaagacttgtttggtgacatcatctgtcacctgtcctggagaatgctccctatgtgcttgagggaggacgtatctgcagccccatgttccctgcagtaacatccacaatagccaccatatggcaggagcctagtccatcgatggatgaataaagaaagtgcactctattcatacactggaacactattcagcctgtaagaagaaggaagtcctgccgtatgcaacaacgtggatgaacctggatgaacctggagaacattacaatcatgaaagaaggcagtcaccacaggacaaataccacatgattccagttataggaggttcccagggaaggcaaattcacacagacaaaaactagcatggtggtttccaggggcttgggaagggaaaaatgtgagctgccggtcagcggtacgatgttctggttacatggcatgactaagatcaaggatctgttgcacaacattgtatctacaccaaacagtgtgtatcgttgtgtctacgccaaacagtgctgtatcgttgtgtctatgccaaacagtgtgtatctttgtgtctacgccaaacagtgtgtatcgttgtgtctacgccaaacagtgtgtattgttgtgtctacaccaaacagtgtgtattgttgtgtctacaccaaagagtgctgtatcgttgtgtctacaccaaacagtgctgtatcgttgtgtctacactaaacagtgctgtatcgttgtgtctacactaaacagtgctgtatcgttgtgtctatgctaaacaatgctgtcttgtacactgaaaagtttaagagtgtaagcctcctgttaagtgtacttaccactaaatagaaaaaagtaaataaacaaataaatttgcatttagtttttaaaagattattttagaagtagggagagagaaaaggtggagaagccaacaagagtgagttactgagctggtccctgattgagaatctggggctggggcaggggccggtctctcagaaccggagaaacacactcagaaaaaggcctttccctgttcattttgaatagcacagttcttccgtcccatcgaatcactctgataacctgagagattggttttacaaaggacaggagcctgggagggcacatccgtcaactccagccgctgctgattgcccccaggggattaccagtatgcctccccacacacacacacacacacacacacactctctctctctctctctctctctcagctcagcctgcacacatctgaggagcccctgaagccagaagacatggccaggactgagagtggcagacagtagcttgggtgggagcagccccccacagcagcccctgacatcagcattggacctaggcaatgcatcatgggacaccaatgtatccactgtgacatggagaagccctccttgaccatccattcatgggacaccagtgtgtccactgtgacacagagacgccctctttgaccatccattcatgggacaccagtgtgtccactgtgacacggagacaccctccttgaccatccattcacgggacaccagtgtgtccactgtgacatggagacgccctctttgaccatccattcatggggcaccagtgtgtccactgtgacacggagacgccctctttgaccatccattcatgggacaccagtgtgtccactgtgacatggagacaccctccttgaccatccattcatgggacaccagtgtgtccactgtgacacggagaagccctccttgaccatccattctgaactggcctctgcattttccctaccctttggggacactggggatatgacttggctgggggacacttcaagaaagagccagccttggggccaccacattcactggtctggaattgaacactgtggatctgggattgcctttagcaaaccacccatcctacatttcatttgcaagatgagcttagagaggagaacaaattgggcagaacctgctgcctcctgctcctgggataagttgcccccaccaagtaaagtttggaaagtctattccttcctcggctgtatgttcttgctcattctgtccttgctttgtgggttttccatgtgtaatgaggtagggagagcaagctccgtggatgctgcccctccaatgcagctgccacacaatggtggccctggggccagcgtcgtgatgtcagcctccaattgtcaggggaagcagagaactttagaattacagaagcttcatccctggcttggttcctacattgattctcttagagccaattaatgtcccattttccccaatatatctttctcttagggcactatgtctaatgctgggagcaataagaggcaacgttctctgctttcctttgcttgattactacacactcaactcacacacagcccacctcctgagcaactctacaggctcatttgaggcagctcagtctttaagaaaacaacagggcagattcccaaggaaagacatgtaacccatattttagcctcttgaaaggcatcgtttcaccccttttaaaaaaatccttccccttccctcctcttccccttccccatccttctgtggttgaaaacctgaaatacatgatttctgtcttgtttctctcccgcaaacaagagtgagagcagagtaacgcattccatatgtgaagggcaggcgtggagagggtgtgcaagcagcgtcagcacctcccgggaatgggctacttccttccagctgtgtgagtgaagaaaaacctcattacggacatggttggtatttctagggtctgagctctgtgtctgaggctgaatcaactagaggttgagccgattggctgtcctctgtgggcacagggaagcatggggacctccagccaccccatagcctcaaacagctgcccagggcagcctctgagctccccggcatcaacggcatggtggaagcgagagtgggctttcttcccatgtctcacccaccagtggttaattggaagtgagagtgggctttcttcaaccaccagtggttaagtgagcaggctttggatacaagggtatggatctgagtcaactgtgcctcttaagtagaacagtgttaaagctggttatctactgtggtgcagtgaatcatcccataacctagtagcttaaaacaatcatcttggattgtatctcacaattttatgggtcaggaattcagacagggctcagccagacggttcatctgttccaggtgatgtgaatggggctcatttggtggcactcagccaaggaatggtctggcctagaggctctggagaacttcaggctcatgcctggtaccttggcaagtacagctggaggtgacctacacgtggcctctgcagcacagtggtctcagggtccttagaccgcttatacagcagctcaggggcccagacaaaatggcccaagaggccccagtgtgagctgcatagcttctcgtgatctagtcttgaagatctagcagtttgattgcattgtatccagtgaacaagctgctaaggctcgtccagatttcatgaaggggactccatcctcctgtatcactgatatgaaccgcaaagaacaccagcaccttcagtctaccacagcagagctgcttcctctccgttaagtctcatttctccctcagagagtgggagcaagaatgaaatgagagactgtgcttaaagtactcagtctgcagcctttgaatagggtaggaagatggcccttcttttcgttggtgcaggaagattggaaatttcctgggtatggagcttctcagaaacctcagaccaagagtccaagaccaagagtccaagtcacccacctaggacctgactcttcctccagctgtgagagagagctcccatactttcatgatattcctccaaacaatgaatttcaagtgcaataaattggatctttcatagagaagacaatggcacactcactaaagatcattatctcttaaaagcaatgactgttggttgagaatgtgcctttcccagcaatagtttataaatgaaaggcaaatcataatagtctttgagtttccccaaagagggagactatttataaatgcagagtgcttcagacttgccaattccccatgcttaagttcctaagtgggagagagcagggcaatgttgttaattgacgtctaaaatattgtactgtgagaggtgctcacaggactccatgggacaccatgcatgctacctgcaggctgcaggggacagcacagtgatgagggtgaggcaggataggatagctcctaaattgtggcttagcctgggagggttcttggcttagcctaggaaataatttaagggtgagctggtggtgttagacagcagcttttattgaagtggccatgcacagcagcagcagaaggacccctccttgtgaggtagggctcccccataggcagtgcgcccagagcagcagctcagagatggtgctaccctcatatttatacccgcttttaagttacatgcaaattaaggggcagattatgcagacatttctagaaatagggtggtaacttccaggtggtcaggtcattgctatggaaagggagggtaatacctgggtgttgccatggtgattgtaaactgatgtggcacactggtgggcgtgtcttatggaaagctgtttccaccccatccctgttttagctagtcctcagtttggtccagtgtctgagcccagcccctggaattgagtcccacctcctacctcaaggggacaggagaggagttgcacagtcactcagcccgacccccaagctcacagtcaaagctggggcagagtaaccaaatccttctggccaggcaggaggcagaggctcgctgttgaaatgataggtggggctggccatgtagggaaggcaagaagccattagcttatctgaaattcatttagggggaaggtggacaaggaagtacctcagtctccactattcaaaacccagggagcttgaaagcaagtggtacatcctgaacctggtgaatgggtatgtccttaaactggtgaatgggtatgtccttaaactggtgaatggagacgtccttaaactggtgaatggtgacatccttaaactggtgaatgggtacgtccttaaactggtgaatgggtacgtccttaaactggtgaatgggtacgtccttaaactggtgaatggggacgtccttaaactggtgaatggggacgtccttaaactggtgaatggggacgtccttaaactggtgaatggggacgtccttaaactggtgaatggggacgtccttaaactggtgaatggggacgtccttaaactggtgaatggggacgtccttaaactggtgaatggggacgtccttaaactggtgaatggggacgtccttaaactggtgaatggggacgtccttaaactggtgaatggggccgtccttaaactggtgaatggggccgtccttaaactggtgaatggggacgtccttaaactggtgaatggggacgtccttaaactggtgaatggggacgtccttaaactggtgaatgggtacgtccttaaactggtgaatgggtacgtccttaaactggtgaatgggtaaaaaaatcgtggggcatccatgcagtgggatattattcagtgataaaaatgagctgttgcaccagaaaaagacacagaggaaactcaaaatgcacgttgctaagtgaaagaagccagtctgaaaaggcttcatgctgtgtgattccaattccgtgacattctgaaaaaggcaaagctatggagacagtgaagagtgcttgccagaggtttgggggagaaagaaatgaataagtgaagcacagagtattctgttttattttatttttttagagacagggtcttgctctgttgcccacgctagagtgcagtggcataatactaggtcattgcagccttgacctcccaggtcaagtgatcttactgcctcagcctcccaagtagctgaactacaggtgtgtgccaccacacctgtctaattcttaaattttttttagaaatgaagtctcactacattgtccaggctggaggatgtttaaggcagtgaagctattctgtattatattgtattactggataaatttcacaaaacccatacaatcctatgacacaaaaagtgagccccagtgtgaagtgtggacctcggtgaatgatagtgtatcaataccggtttgtcgattgtagcaaatgcaagatgttaacaagaaagttgtacgcctgtgtctggaggggaaatggtgtctgtgaatgctccatacatcctgctaaatttttctgtaaacctaaaactgctctgaaatataaagtccattaatatttttagagtggtagtggagaggatgcagggcatgtactattcatagtcttctatgaacagcagactgcagactttgtggagtttggaggaaagcaaaggaggcccagcctgaagcagctgcttccacctggaacagcagatggataatccactgtggcccctagaaccctgaacgctggggttctgggaaaaggatggccctgtttctaatctcagaaccgacagtgtttgtgttttcacacctataaattgaggctgatattgcaagtcccactccggcagcgggaggatgagctgagatgttaggtgtgaacgtgtgaggtacccccaggattagtgcctccctgagccagtccacctggcatctttgttccaggcctaacttccccgctggactgtgaggtctgagggccagcaaccgtgtctcttgtatccccagctgcctctgtgaaacgtagcacagcccctgtgcatagttggagccctgaattaatcagtgaatttagaggattcaacagggatgggacaagagactttgaatccttcatataggactaggctgagctcagttcctctgagcctgacatctgtgctgttctcacttatccatgcacatgaacccaagtatgctacacaaaggcactgattgccgctggaccaaaggggccttcctcatccttgattgacggagctgcgcctctctggtcctgggagaaccccatgtcatctctggagaacatccacggtccttcttaatcagccatccagttttctctcttctttttccttcgtcatagaattctccagaagaaaccagtcttgagacagcaaaagtgttgcctgaatgtcagagatgcttttcattctcacacaatgtgtccaagccacacagctgaaggctgtgtgcagatctcggccttctgctagggtccctcacgcagccccttgaacctcttccttctgcagctgttgggggcagagaagggaacttgcatcctcccaatccatcctctgatgccctaacccccaacaccactaattcgtctgcactcacggcctcttctgcgtgcagctggccatctggacctagtccattgggatgaatcttgttcctgggattagtttccctatgtggcttgagcgctgagttgcctgttgagttacccagatgatcatgtcagtatcaccccaccttcttccttagggtctcctttctgcctcccatgtggtgtctgatcacttggaggcccctcctggctgtcctgagactcccattgtcacgagcccttccccaggaagaggacttccagcctcctctgcgcccctgcctcacttcccccatcacatcaggcattcatgtgccaacccaaggtggccccttactggaaaactatcaaaactgaagtctcaggaaggtgttggagcggaaacatttggaagtgactgtgtgccttccccagaagattaaatactgatgtgcattctgagtcacctggggatatgtcaagaatagtgtcactcaggccctgatgatatttgctgaacctgatctacagagccgggcaggggtccatgcaatcaaatttttaaggcgcttgtcaggcagtcccactgtcagttagttccccttctcccaggaagtggctctccagtggggcatgtgtgtctgagaaggcggcatcttcccctggcctctccagtttcttctccattagagttccaaccacagagccagaaagtggagcacctaggcttgctggaggtttgcttcctgaggacagatgctcggcagggagcccccatgtgctacctgagcagaaggcagtggcctgggcacttccatcccactcgccggggatcccagccacctctcacagcctaggacttgtgttctgcagaaagtgatcagctgtaatcccaaaatttgataagaaaacccggtgaaagttaacttgaaaggagccacccagcccctctgtaggtgagagcggtttcacccaggccctcattacccagcagacagcctcacactccaggtggatatgttagcaccgaagacctactctccaccttcttcccctctccttggtctctggtattttatggccactgtcctatgactcctactcccagcatgtcccttgttttctgcctccctttaaatccaatgttatctattttactgtttaatttgatttcctctcctaggacgttagtttttatcatcttccttgcactcccccgacccttgcctctggaatcccaggcagatggtgcgttcaccgggacccactcttgcaagccctgccctgttccttttcattcctacttccttgtggggcagcggcttgggcaggtgcagcatcacgggaccactccccactcctgcaaggccaagtcctgggaaactcctctcctctcccagcttttgcaatcctgtattcgggtttctctatttgggtatttgctgagccctgcaggccagatgctgtcccaggtgctagggacagaacagaacattgtgtaggtaggagtgcccctgccctttggaaatattcaagaagctcagaaccagagcaagaggggtgagcagctgtcactacctagcagccttgccgggggtcccgcaggcctctctgagcagaagcctgtgtgccgagcagccatcagccatcagggcatctggggccgaatgttccaaatggcaagttcagagacccagatgcaggaaccagctagggagaaacaagaggccattggttgggagtggagtgcagtgccgggacaccggactgaggactcgggcagaggccagagggtttaggacctgtgggctgttattgagtgtctacaggagggcccctgagggctttaagccaggactgggatgtcacagtcttgattcagtcttcagtgggtccctctggggcctggtttgcagagagaacccagtgaggaggagaccggcagagatccaggtgagcaatgatggatctccagttttcagctagagggaagtggatgcacttgggatatgctttgggataagaatcaaccacaaaaggaaaaaaagataaaaattaaagtaaaagaaaaacattcagttctctgccccaccttaatggtaccaggatacggggcaggtgaatgcattaagtcccagatgtgaagcgcacagtccatcccacgccggggaggcgggcggggtggggggggggtcccagggaacaggtgcagaggacggggccaggctgagggaactggggcccacgtcccccgtgggacatgggagtgtaacaaggtgcactgtgtctcacactgacactattagtccacccatgtcagcggctcccgctccagcagaggttaccctgacctcctttctcctctgtcaagctgcttctataaaccagccagagacaaggcagacatgatgcgaggtggagccagggccctgtcgttggcctccctgtgacacgtgtgtctctgctcccacctctggtgttcccccctttttaacagcagacaagaaacaaacaagcaaagcaacaacatggaacaaacaaaagccctgggatctcaaaacggcccctccccatcttctgttgccaggacgcatctcccttctccagcagatccgatacctttgattgttgcatggtttgactgttttgttttgaatttttttccccttgtgaattgcatctcctgctccatggaaatttccaaagattcaaagacccccaagtcccaggggagtgagagaagcagcctcacctggttcttcctcagaacccagagtgcatggtgtgcttctttggagcacagtcatgactaaggctgtaagtctgaactcagccagccctgggttccaggtcaagctcctcccctcttttcatgcctcagtgtcttcatctgtataatgggggagtgcaggaagtaccccagggtacagtgcagccagtgggggtcatcgttggtatcattgctttatgggtccaccccctgggggctcctagagggttagagcctgggccacatgtggagaggggaacaccctgttcccccaccctcaaggctctcggagtggccagagggcggacacacagaaaggagctccaccacactgtgaggagagaggtgtccaccaagccctgcagcagctaaagccaacacagtgctccgagagaaaggagctccggagggagcagcagaggcacaggcacagagcctggatgggggcgtgtgcttctggatggactagagggtcaggattctgctggtggcgagtgggccaggctgagcatgagactggaaaaggaaagaagacagccctaggttggaaggggacatttgcatctttccccctgggatttctgcttccaagggatgcacctcacagccatgcccccaggtcctaagtcacgctgcctggagtagaatctcagcccaccccgtgccggcgggtgacccaggccaggctgctcacatacccaagtctgtcctgtctgtggaccatgggcatcaccacctccgtcctatgtgaggatcgcatgggatcatgactgaaaaccttcgacacagtacctgccacacagtacatagggatccctgttcatggagaaagatagattttgaaaaacctacaacaataactctattcctttctttattcccagtgtagcttcacctcagcgggtgagcgttattggaatggaaggcagggagcgatctgtactggtctctctgctgcctgctcgcccctctcaatctctcctttgctttttgctttaagatcgctcttctctattgcatgcagggagttttcttgagctgggtagcaggctgattccattcatttctacagtgccttgaatatcttcaatcgcccacaaagacaatgttttattctacgaacacaccttttgccaacatctcactgctttctgtacaaaacagcctttttgtcgaacattgaagtgtctacaataataactatcaatagggaaggaaacaaattaacatccaacgaatatagggaaatgtggccctgatacaagcacttggtttttgcttctaaagaggaaccccttcccagactcacctcatcgagagggagacagagaagtctatcaagcttagcaaacatctgtagtccaattactgtcaacagtttacaggtgttgagagcaaacagtcacttatacactacctcccaaatgcattctcttaatctctcttagaaacaaacgcacacatttttctagggctctttatccaaagtgcagagagactagctcctcctccaggccagctgtggtcttccctgcactgggtggaccaaaggcaggccacagtcccactggccaatgtgccaaacactgtgccagggtttctccagctaccccaggcagaggcccaggctccacccctggaggtccaggttctggaaatccagggtggggcataggagagagcatttttctgatgcttccagctgctgctctgttacgtgggacatactgtctgtgggacaggccgtgattctcaaatgctagtggcatgagcatggactggagagattgttacaaggtcagcttccaggccccacttgcaaaagctccaagtccatggatttcaggtggagcctaggaactggcatttttcatgagtttctctgtgattttgttgcagatgattgcagaccagaggtgggcgtggcggggaatcccatcagcattcagaatcaatgtagcaggtctggggtaaggcctgagtttctgcatttttaacaagctcctgggggatcttgatgctgctggtctggggaccacactcagagtgacaggctgaagaccattctttggaggcactgctttgtattttaggtcatatttttcttttctgtctcagcaatctttgctgctgcattcagagtaagtctgataaaccaatgctctctactggactcctgtcagttactgcagtgtttctgaaactatgtatttcggaaaatgcgagttcccgtaagacattacagctgtgtaagaaggtttctttgaacaaagttggggccatgctgcgtgtgccagggtcccagctctgggtgagaatgctggcactgcagctttccccgtgcctgccctctgcaccctcctctgcctgactgtatagtggagttagaaggactccaagagcaactttacataaagctcctacacatgtccctggcacatagctagcaccttgtaaggacaggctattgtcaaactctaccctttctggaaatcacgctgcagtagactcaagattcattcagtagtagagggagatgtgcttaacacagtgtttggagttcaggacccacctgctcctggaccccagtctccctgccacacactcataccttttctttttcaaattggcgcgctcctcagcgcttcaacagtttcgcagagcacgttggagcaaatgcgggggtctgtgatgcctctccaaagaaataactcgcataatgctcaggcctcctgcagacaaaggtgtatccccagcgacagatattttaagaaaatagaccagggacacaagacaagagagctgtcttggtgtctaaagcagtcttggacagcttctgatgtcgctcgagcagtggtgaagcaccttgaataaggaggaaagcagagggggcgtcttcccaaaggacgggcacatggccgaggaatggaattctctgtccatgaggattttggatggatctgttcatgaaacctcactggctacgcaggaccttcgagtgagtctaaacctccagccatgtcaactggtaacctctccttcttcggctaggtggggagtgggacaaggccataactgataggagtccaggctggggcagattttgtgtctcctgactagttccatagttaagttgcaaaaccgaatctcgccttgtgctctcggatgtagtgcttactctggtcctctggggttatctaaaatctggtttccttaagcgtaaggcagagctctaaccgggagaccaccctgcccccaagggtgggggttctgggagggagagagggaagcggctgctctgtagctttctctactggcttgcccaagtggactctgatcttggagctcaacagtgtcactcaatcttccaccctctcctttgcaacctatttcttaaaccagaactaatgtattctggacacagagtccctgaaaccccagacaaagaaaattcgatgtatctgaacaaacaaaaccgcgtttctttaaatctccaagccaaaaggaaaagtgcagaaacatttactcactgtccgacctgtacatatattttacctgataacccttaaagaagtgccccccagttcagccatcacccatgcagggcaaagggagctggagctggcccagcctgtcggcgcagacactcctgacagctcctgtctgggcacttctttctttcttggagcttctaatttctttcttggcttctgaggcctaacagggtgttttgatgcacacacaggaattactaccgtccccaatcctagggtacatccctagcccaggccagggctttgagttttcctaggagcgggagggtctgcaaagccccacaggctgaaatctcagcgtggccctctgctcatctgctccaggtggaaactctcacccctgagctgcccgacctgggttcaagcccgggtcaggggagttagcaaggagacacctgaaaaataaaaggacagaatggaagtgcacactcccaccgcgggcccgggcgggaagtcggactaagaccgcggcgggaccgccccatccagaaagggtgccccgggtgtgggggcggaaaccccagcgctgtcttcagtctccacacccgcgcctttttcccctggaaaacgagcgtccttggcctcttcggccgcaaccgggcggctccagacgtccaggagggcagaggctgggctggtgcggcgcggggggcgcgggcgcgggctctgcgcctttaaggcccgcgtcggcagagcgagcgcaggggccgggcggcggggcggggcctcggcggggcggccgcggcttcacctgcagctccgagcgcgcggaacagaggcgcgggcggctgcgaggccggcggacgcaccggcccgagggaacgcgccgccggccggacttggcctggctcccggagccggggcggcgagcgcggcgggcgcagcggggctggaggctccgggcaggcgcgggggagcggcggcggcggcggcgatcggagcggcggcggtggtctcggcggcggcggcggcggcggcggcagggagcgggctcccggtgccgggcaccgggcgggcggcggggaagatgaccgcgggcgccggcgtgctccttctgctgctctcgctctccggcgcgctccgggtaagttgccgcctcccgcccccgccgttcggaagccccgggcagcgggaggtcgtccccggatcccgcggggcgctcacacacccggcggggctctcccgggctcccccgccgcgctccccgctgcatccagcccggcgcccgcgctcggcgaagctgcctgcggtcggcaggagcgggaagccgcctgggcagcggggagcggcggagcagggtgggagtggggctcggtggaggacccggggagctccgcctgcaccggacccgccgagcctccctcgaacgcccaaagcccgtagccgctacccggagctcggcttgcctgcatggggcaggcttccactggcggagccggcgcgccctccatcgcccgggagccgcgcgccgcgggagttgccgagcccagccccggccgtggctgaaggcgtggggcgcccggcggctgcgggccagggatccgcgagtgcggggcgcctgcccgacctctcctgcccaaggcctgggggtccgtctagcggcgccgctcagttctgtgggtgccggcaggacccgcgctgcgggtgggcggcggggtaggactgcggggcactctcacccccgagccctcggcggggctggagcctgcgtgtccggcggggccccgggggctgggagctgggccgggcttgggccgggaagccggacgccgggcgggcgcggcgcgggagggcgccccgggagggcgagcgggtctcccgctgcctctgcagagccccgcgggccggattgccagctttgctctgcgcctggcgaggtgcgcggcccgcgggggcagagagcgcggcggctccgggggcgcccctgggcggaggcggaggggcggcgggagttgcaggaaccccctctcgtggccgatcggcctcgctgccttctcccgggcagcgctgttgtaacctcggaaataaacaagtgccagcggcgggaggcccgctccgaggccgcggggcgctgggggacgcgctgggcacacgcttcgggcgggcggaaactttcctgggcgagttgagcctcccaccgggctgcgggtgcgatttggagcttcgtggccgatgaagaaagccgcggtttagagcttttcgtaaggaatgaccctgcgtcccgctctcctccctcggtgctgggggtagaggggcgccctccgcggtgccggcgtcgggaagcctggagctccgggctgggggcggcctccggagtcgaagcatgggcgggcgacggcagcgcgcggagctggaggaggcggcgggcgggaggcgccactgcccggtgcgggctgcacccgaggcttcctgcgctcgccggggagccaagcaccgctgtgctcctgctccttcagcggggctggcttcccgcttgcacacactgcctctccctccaccacctcctcctgcctgtcacgccccctcccagaagcttggtcggagggccctgtcgtccaccccatccttccctggccctgtgccatgggctctagacttccccactgagcaggaaaggcgagcgagctccggaggacaggaggagaccccctttccggtcagttaggggagccgtctccctgcctgggctggagatgggggctccgagggtgaaaatgcgggctgaagactagaaggtggaagcgcccccactgcctcctcaccccagccaccggcagcctcccgcagagctgccttcttcgaccggctccggacctagtcctagagaatcttcttcctttctctcctctttctcctccctcccggtgacctggagaggagacaagaagctgcctcctccgccttaccaagagcgcagagcggtgggcctaaagcgcgaatggtctgagcagagccgcccacactttggcctccctgcccttagtggcttcgggagcagcggctgaagtcttctgtctctgccttttggtcatttctcaggcgtctcctctgccaataaggccctggccggcctggcttccccaacagtccgtccttcactccctgcctgctgtgtgtggggctggggaaggatgctcctggtctgtagcctggagagtgctccctaaagtccccagagagcagaggagcagacggggtatcgcgtctgggtggagacggtggcctgccagcctttctctcttagccagagaccttttacacagcaggccctggatgaatgttggttggattaaatttctgtgaacttattgttttacactctcccctttgtgttctcaggcccataatgaggatcttacaactagagagacctgcaaggctgggttctctgaagatgattacacggcattaatctcccaaaatattctagaaggggaaaagctacttcaaggtaaggcggggtgtggaggggtgggagtgaattgctgccatgcttttccttggggaaacatgtagatgggagaggcaaggcttgcctcatctttgtgctctctgtgaaatgatggtggtgaagtccacgaggtgcaaattggttgacctgaaaggcgttttgcataacaggtgaatgattcagaaccccggtcatttttgagtgaagtgaatcatttcctgggcagcaaactgtaattcggatgtaacatcacccaaatagtgtgcagagagagaccttcttaccaagtatttttatgcatgaagttctggatacttaaattatccctgctttgaaatgtatgataaagcagacgatgttgttggaaatgcggtaaataagcccacagacggtctgttcacaaatgtggcattcattttcattactgccccactgacaacacgaaaacacacatgcaggagggaactaccaattagctttatcgtaattgcaggattatatccacacttgtgatgggaaagtcagagacagcttcaaaactcagatgacagtagatcatcctgcttattggtctgtttccctttcaagacaaactaattagactttatatttgcataggaggggacataaatcagttctgtgccatgagcaccttggctgtgagcctttcctctctgcatcagtttcctggaagtggcagcctttgaattgatttcaaagcgatagaggaagaggacttttgataaagtatcgaagctaaatttccacattcaggactgttgactgccctaccggttttgtgtcccagggaatgtaaacttttccctccagaactgacagcggttcctgtgtatgtgtgtgtgtgcatgcatgtgcgtgaactcgctcacgcttatagtgaagtgatttttcagatcctcgcccttcaagacagaacttgttgacgtgccttgttgattcctggttatgtggataggatttttattttgcaccgaatccaagttttctgacttagtttttttatctaaactgtgatactactgactcattaatcatcaaaaaaataaaaaatctctaggcagtcggcctaggagcagaatagatgtgcaatctaacagggcatacatagtaaagagctttcaagagctactctgttaattgcactgtgtatgtcactttggagttagaacgggtaggccattttcaggatcgtttggtttactgagaatctcagtggactcccagagaaggcctgaggggatccttcactctcagtgcgttggacggtctcttataactcgtggggcactgactgcagtctgctgtgtgcatgtcctgctgtgctgaaactggcatccttaagttctctgattatgtggccaaatatgataagaccttggagtatccattttactcaggcacttcagaaaaatgcctctctttttattaataaatactgcttactacagaagagaatgacaaattctcatgctttctacaacgcagcgtgagatttcaaacaaggatctcttccctttcatggtgtgttgtgtggggatatctgctccagtggtccaggccaaaccgtgctgtgctcttgatcagtgtggtgggaaagcctagatcactggccggatgtcggcctggcccctgtgcccaggtggtgttcgcctcgtggggggccaagagtcacatgcccctgggtgaatctggaccagctcagacattgtgtggactcattttccaagtgcccgttgacttacgtgtgcagcccagcccagggctggttcagggaagcattgcagagaatctcccaagcacctgagcatgctgggtcctctctgaccctcctctaggggctgtagtcgcattgcttctcctgcgcctgtgtgggtccccttctcactgttttcttccactcgttcttctgaaggtgtagagtctcaggaagaaagagatgttttatatcttacaaataattttgcacatatggaggcaagagctaaggctgacaggcactgaaacgagggcacagtgacatttctctctgtacgcagagtactttgaaactacaagaccacagtgaggaggcctgtgtgaagaggaaacaggaagtgtggtgtttctgttattctggtaggaatcaagttaaacagataatgactacttataattgagttattccagcggagagagcttaaccttaatttgacgagtgaagcttcacagagtggccatgttcctctgagtaggccatgagctatcagcgactgctccgtggctccttctctttgcctgagtcagctcacagcagccccaaacatacagattccagcaggagcgatttgttacacggtaattaacttgtttatgataaatggatggaagaaatgtcgtggcattttgttttatgtctaaatgaaaagcatttgcattctaaaaatttcatgctaattaggctggaaatagttttccccaatagggtagcaaatactatgtattacgaaccttccgagaagcggagccgcgaagtatggaaatgcgggacttcgctgctgatcggagccttccgagacgccgctcctgtgtcccctgcctgcgctttttctggagagcatttgaatgcaattgcatatactcttatgctgtacttttgtttttaggataattcacttatggccctgatcactgatgcatggccgtatctaaaataggacggtgaagccgtttgccttaggctaaaatgcagtgttctctaaaccgtagtttagtctggggtgatggctaagctggtatctttttctctgctttgttaataattaatggccagcccgcccggaagctgcagcctggtacggtgacctgcattgctctcccgcgtggtgggcggagtctaggcacacccagacccgattcataactcgtagaggcgggagagtcctaggtggcatagtgggaaccgagggctcccgggtcgtatctcccctctatcctgcaacgaagcgggaacaggtgagtggaaacgctgttcactggggatggggcggagcctggcatcctcagattaacatgggtacactatgggccacagagtatagaaagaggagcttggctgggtgcggtggctcacgcctgtaatcccagcactttgggaggccgaggcgggtggatcacgaggtcaggagatggagaccatcctggctaacatggtgaaaccccgtctctactaaaaatacaaaaaaattagccgggcgcggtggcgggagcctgtagtcccagctacgtgagaggctgaggcaggagaatggcatgaaaccaggaggcggagcttgcagtgagtcgagatcgcgccactgcactccagcctgggcaaaagaacgagactccgtctcaaaaaaaaaaaaaaaagaaaaaaaaaaaagaaagaggagcatgtttctaatgacttaacgtgacgtcctcagcaaagccttgcctctccccgtttctcagttagtttaggaccatcttgtgtaccctcgtaccaccctctgcctccttactggagaacttacattatctggccaatcatctctcttacttaaactctctggtttctgagggtaagagctctgtcattcttatttctatttatatcatttcaggatgttcttggccaacagaataaaacccaattcacataatcttaaataaatgggagtaaatttttcttacataaccgtgagtgcagacataggtggtcacatgctggaacagcagacaagggacacggtcatgtgcctgcctaatcctcttcttccattctgccatctttagtgtgtcatttagtgcctcgtcactgcaaactggctgctgtggttccagtcgttgcttctgagttcagagcagaagaaggtgcagatagtagcaccatctgcatttcttccctgtaccaggaagacaaacactttctcagaatccctgcagaagttttcattgactaggtcacaggccactcttagctaaactgatgggggtggagcactgggaatgcagagaattgcattgtcatgtgtgtcttagatccattataatccatcacatggtaggtgtccaaattgctcgtctcagaacagaattggggctttgttttaggaaggaagaaggagggatggatgctgagtagaccttccccagtgcccagtgctgtacccgaagcagagttgacagacagtgaattgctgaatgagtgaatgactcatttgcatacaaaggcattcagacagaggcatggttgaagagagatcagatgcagtgtctggaatccatatctaagaatctgccatttctgccacactgcatggccagaagtactattatcttgtctttacaagtaggttgaagataggctctttgcccatgcagtttggtttgaaccacctctgcatagataggcaactcttccagggcagacacatgctagatacacaggcaagaatgtcatcccatctccctgcatagccgatgtccagcaccggcctaatgcatggtggctgtgaagtcagtattagtcaaataaagtaatgaatgagccggaaaatactgacactgttcgtgtttccgagtcgctttggttaactcacagcagacagggagctgctatgaatattcccataagtggcactaatgataagccaaccacatatgcctggaattattagacactggaagttgcctgtccagtattgattctctctctctctctcccttgccaacaaacctcatctgtgctagtccattggctgacaatgtgccctgtttaatacacctctagactcatttacaccaatgtggcaatgtggcttctttctggtcaccggtatctaattaggttagtctattaggttaggctttggggaaagctgtttttattcttgataacaaggaacaaactgagctggccatgccttccaccctttgctcttacttcttcctcctacctggaactcagatgtgatggctgagggaaagcagccattttgtgagtttgaggatggtggaacacaaattgggtcccagaaggcatcctcaaacaatggcagagccctggactcattgtctcctgagtggtgagaaaaataaggtcaaaacaccacgcttggttttgttgtcacatgcagcctcgtgcattccctgacttaggaaaactgcacactagcaaagtcaaactctgtcctgagcctaggttttcaggctccctctaccctccagtgttccttggaccttggccacttgctcttgctttaaaggccctcctctgctccttttgtgaattgatgtctgcacctagcacactggattgcagagagcatgtcatgaatacttggtaactgtttgttgaataaatgaacagtcactactccacgctgtcttatgcccaggagatgaaagaacccttagatatattaagccgggactatctgaacccccaccagagaatgtaaactctttgctggatctcatagtgatgcttctccaggaagtcaggagttatgtattgggggttttgcctctggtcacaatatctactggttctagggaaccttggtctctgtagcgaagcagaattatgtgaaggctgggtgggactcagaccccactggtggcttgggtgagctcaaagcccagactttcttgctgtcaaagtcagaggactacttctttctgagcacccagacccccactgcctccatgggtggtcacttcagggatccccaaaaatgggcacgcagagcccatgagggagaccgtgggatctctttggccatctctgggggtggtccttgccttttcaaggggccgttattgtttgaggtttccagcagcttttccctcttatagttttgtctggtcccagggttaagaggttcagaaagggaagtatatatcctgtctttagaaagtggttgctatcagataaaaggtaggagcggcccaggaataaagcacagaaagcgctgcatggtgcatcatctgcaggccaaatcccactctgagagagggtcctggtagccctggttagaaataaagcgaggcagaacactgccgccccgggctctgcacagccacttgcccctgtgtgcagctgcttctcacagctctgccttccatcgcaagagggagctgtggtcagtggccctgctgctacccaggaggaatctaggctcaaggaggtggccacacctgccccagattcctaagtcagtggttccttagtcagtgattcctaagtcagtgattcctaagtcagtggatcaggattcccaccctgcaagattcctaaccgctgcttctctatgctcactgccactaagcagacccccttcattgtagaaggcagtgcatgcaccagctacagaaatgaggatgtgtgaactcactgacgctgtgacttaaagattcaggttttgcgtttgagaaatatgtgttttaatgagtcttcagatgagggagcatgaggctttgcagaattataatataataacattatgttctgtccagtccttggtatacgatatctcatttaactttcacaaaagcccttccagggaggtaaaattgttctcattttatggatcagtaactgatgatcggtgagttctggagattggcctaagggtaggagatttgctctgttttccctctttgtgcagtcctaggcacttagctcattcctatctccaaattaatgttaaagaagatggttttagagcaccactgtcacgtgcagacaggatcggacccagatgttcagggccacagccataagaccagcagtgaccaggcacacaggtatgtgcagtaaacagaggccctcagtgtgtcagaaagtgcttggttgcagttgctcatgtataaggctcaactgaagtgggtctaaactctcgacaccgggggtttgcaaaaccagccctgggattagaagagcccgcggcttctgtgatgccagtgggagctttcaattctgagcatgcagcgagcagtcccagagccgagctctctctcggattttagactctgccagcgctggggaagccgggcagagagggagcagagagaagagtccggctggtcctggaagccctgagcacgttccatctgagctgggtttatgcacggatccattgttgtcaacactcacgttgtgacatggggcaccaggaaccttagtgaggccggttacagattgagagaaagtgccacgactgtgcagctggccagccggggcggggctccctgacggcctctcttgagctgatgccgtgagagctggtcctgaggctgccgtggcctttctgcccatgtcggggtcctgggtgtctgcagagatctcgtactctaagctgagagagagcaaggtgcttggtataacttgaaacagtctgaagatgtggtgctttccgaggttcacgtgggttcccgttttctgccaaaaccccttgcggcgaagcccctttgcacgcttttgcctccaggggtggccttcctgggcgcagggtcacttccactctgggactgcgtggcgactgggttggtgtaagcttccaagacctgtggcttctttgtttcagaaataatgatttttctaattctaccctgcagtgttaaaaaatcacaatgaaattcataaccaagttcaaaggaagtgtatttggtgtgtgcatccctgtattgtgtgctccatgacactaatttcaaaatgtggaaattttgtgacttctcttatgttgcaaatggaggtggataaaggaaagggctttttcctccttacctccttacctcccaccctccttcctccttccctctctcctccctccctccttccctcctttcctctcttccctctccccttccctccccttcccctccctccctcccttccttccaccctctctcccttgctctctccctccctcccttcctcctttccttcctttcttttttctttgaaagctgggttaagtagatgccaggactaatcatgaactgagagagagagagagagagagcaagcaagcattcatcttttcaaaaagtgtgcctattattctgactttttgaagaagtaatttctcctccaagtgaattccactataaaaaataccataagccgaatgaagcttctttccgtcaagggcggtaaagttctccccggtgtgttcttgtaaaacctcatggcatttgcaggctccttcagtccccagagtgggactgtggtgtctggcaagctgggctggtaaaatccttggtttttcgtcaaaaggctcagaattttggtgcctttttgcccgggctctgggctgccctctcctggtggcctccggtattgtctctggctggtgtctgctttcagttcttaaacaaaagagaacaaaccaaccaaaaatccctatttaattatctttgacccagtatgtgctccccgaggccattttcctggcaacccccacatcaggggccaggaaggaggggaggagctgttgtttggggggacttaccatgtgccaatgtgtcttctcatttaacgctgtcaggagacctgcagcctaaggtagttagaaggcatgccccagatcactcggtatgggcaggggactttgtctgtatgtttttatctcccacactgccttttccaggaggaatttacttagattacaaattgtattattttcttattgcagtataaatccccacatatgtagcagcttaaacaacacaaagttattatcttgtggttctgaaggtcagaagtccagctccagtccctgtgctgaaatcaaggtgtctgcagggtgggttccttctggaggctcctggggagaatctgtctccttgtgcctcccagctcctcagggctcctgcactccttggctcctggccgcttcctccgtcttcagagccagccgtgaagcatctctgtgccgtcctccagggtcattgagggtcactggtcacatccacctctctctacatccttctcttccacttgtaagaatccctgtgattaccttgggcctccctgagtaacccaggataatctcccgttgcaagactcttaattcagtcacctctgccaagtccccactaccacgtgagatcccaggctcacagcctccggaattaggatggggacatctctggggagtcgtgattctgctgaccacatgcgtgtctgacgacagagcaatcctagcaggtgtgtgtgggagtttcccactggcttccgcacactaaggacttgctatgcgtcccacactgtgcggtgaccttcattcaaccctgcagaacccagtggttccttcattcagtcctacacatacctcagtggttccttcattcaatcttacacatatctcagtggctccttcattcaatcttacacatatctcagtggctccttcattcagtcctacacatacctcagtggctccttcattcagtcctacacataccccagtggctccttcattcagtcctacacataccccagtggctccttcattcagtcctacacatacctcagtggctccttcattcggtcctacacataccccagtggctccttcattcaatcttatacatacctcagtggttccttcattcaatcttacacatacagtggctccttcattcagtcctacacatatctcagtggttccttcattcaatcttacacatacctcagtggctccttcattcaatcttacacatatctcagtggctccttcattcagtcctacacataccccagtggctccttcattcagtcctacacataccccagtggctccttcattcagtcctagacataccccagtggctccttcattcagtcctacacataccccagtggctccttcattcagtcctacacataccccagtggcttcttcattcagtcctacacataccccagtggctccttcattcagtcctacacatacctcagtggctccttcattcagtcctacacataccccagtggctccttcattcagtcctacacatacctcagtggctccttcattcagtcctacacataccccagtggctccttcattcagtcctacacataccccagtggctccttcattcaatcttacacatgtctcagtggctccttcattcaatcttacacatacagtggctccttcattcagtcctacacataactcagtggttccttcattcaatcttacacatacctcagtggctccttcattcaatcttactcatatctcagtggctccttcattcaatcttacacataccccagtggctccttcattcagtcctacacgtacctcagtggttccttcattcaatcttacacataccccagtggctccttcattcagtcctacacatatctcagtggctccttcattcaatcttacacatatctcagtggttccttcattcaatcttacacatatctcattggctccttcattcagtcctacacggacttcagtggttccttcattcaatcttacacagacctcagtggctccttcattcagtcctacacatatctcagtggttccttcattcaatcttacacggacctcagtggctccttcactcaatcttacacggacctcagtggctccttcattcagtcttacatggaccttagtggttccttctttcagccttacatggacctcaatggttccttcattcagtcctacacatacctcgcaatcttacacagacctcagtggttcggggtggcatctccacttcactgttgaggaaactgaggcatggagccattgagtgacctggcatgagctgtgggtcagggaggtctatctgaaggaatgctccagcacttagccacagcccactggttctcagcccgtcctgcctggctccaggagctcctgccacctgccttatccagtggctataattaggactcagaggggcagtgtcccttgtgggtcctgaggtggggatttgctgctttggaactccacagggtgaactgcctgggaagcccatagcagcttccgatctgggcccttctaactcttcctcgtttggattcactgtgctttcctgctgagagtatgtggggatttagggaggattaaggtaagccttccatgacagataaatatccacagggccccagagtgccgcccgcaccttgctaacaggaagctgatccttgagagtttgggtgcttcccagcccaggaaagatggccctggtacagccgcaggtgttgagaggtgtgctttctcctggaatgggtgcattttccatatggagtatgatttaatgaatttccagccccagagtgtgggtattggacactctgtctctccccaggggaggacctagctctctttgtctctggagaaggcagaggagaaaggcttgctttccaggcctcttttcaggagtgtgcccttgggtttctgtgtctgtattggagaaatgttgacattttttgctttgcgtttgttctggccacccaaatgtgagttgagatgccatctatattgatgtgcctagaaaagcaagaaggaaggttggtgcatgagtttgctaggtatgaagtccccgacttccgcttccaggaaggtccaaggagaaacgcaggctgcagcccccgatagggtgcagagagatgctggtggggagtctggagagggatgaattgggtgagggcccttccttctctggacctcagtttccctgtgcaaagcagaggggtaagatgtccaactgtggtccaggaactccctgcctggggggtgcttgctaaactcgccagccccgtgggtcctatcccagacctactggagggtgccgacagtggcccacaaaggatccatccacgcagagcctccaaatgtaacattatttggagaaagggtctttgcagatgtaatcagtttcagaatctctagatgagatcatcctggattacctgggtgggccgtaaatccaaggacaactgtcttgacaagagacagagaagacacagacttggagggggaggccccgtgaagtcacaggcagagattggagcaatgcaaccacaagtccaggaatgcctagagttcctggaaggtgggaaggtcaaggaaggacactcccctagaatctgcagagagagagagcagccctgttgacactgggatttcagacttctggcttccagaactgcagaagaatacctttctgttatctgaagccaccaagtttatggtcatttattacagcagtcacagggaacgaatccacccactgaactgggaatcctgggactgtgacctgggactctgctgtttctctccatctcccagggaatccgatctttgcgaaagcatcagggcttcaggcttagaggatgtttagcctccgattccccaggggctgcatcccttgagagaaaccgtgttacctgggaaggtgtctgccgaatgtaaccagcatctcaaagtgcagctcaggtgggcggcttgaaacagtgctgggtgtttccatcccaccagaaaggcaaatgaggcactttagtgtagtaatggggtattttatattgtaaagcatgacatggaacaatttcattggaattaaaatgtatatggaacatttgttctccacccattatcttcctctatcaaatggaatcttaacaaggattatagctcagataatatcacatagatatactgtaaatattttgttaatctaaaggtctgcgttggggaatggatcgttcaacagagacagagaggagaggcacactccctctgctgatgagatgtggagggatgcagagaggagctgggcactctctggcgtttttagaacatgcctcttctctgcccaaaaccgctttactgtggaaatgcaaaaatattttatttctggctgcaggagtctcctgtcctgtgtttccagcagctgtgtgtctgcagcctggctgagggttcgcacacagctcaggaaagcggctgctgagtctggcttcagggcagatccgtgtccctcttgcagcctgtgttgcagcgggctgattgcagacgtgggtctgggcctgtacttgacaggggaatgctctttgtacccctaagggtcttcttccgacatgtgtggctgtgggacacacagcctgccctcccatctctctttctgtgttgggcagctggagagccagtgcctggaatgggagcgggcctggctggcccagggggtggcatgtagctggatgccagagcatctcgggtccacccacctctccagcatggatcccgaggaggggctccaggccgaggagaggagaaggcacctctggctgcgcttgaccttgtcctgctcatgtctcggagcatctcagccagaaccaggaggcaaagccaggcagtgggagccgagtgggacctgcacacggggaggcccaggccaacaggtcagtgggctgaattgctttttcctgatgccgggttggcttgcatcagcgagaacttgaaagaggaagataccttttctcctgtcttcttgttttcttcagggggtgctatggtttgagtatttgtcccttccaaatctcttgttgaaatgtgatcccagctgttggaggtgggcctggtgagtgttcatgagtggtttggtgctgcccttgtggtaatgagtgagttcccactctgttagttcctgggagagctcatccttatagaaagagcctggcacctccctctcattgctcttgcttccattcttgccatgtgatctcaacacatgggctgccctttgccttctgccatgagtggaagcttcctgaggcctccccagaagcagatgccagtgccatacttcctgtacagcctgcagaaccatgcgccaaataaacctcttttctgtgtcacttactcagcctcaggtgttcctttatagcaacaccaatggattaagacaatgggatattaccaaggctctggacgatttgtgggtggggacagccgctggtgtttgactcctgcatcctgcaaatgtgatgaggagtgttgcgcagacaccttgggtgagcatcagaaccccatggaaagccctgtggtggtcctggggctcggccccacttgaggggttaacagcaccactgtctgttgttctggtccactgatggagccctccccatgccgggtgctgcaccgtaccagctgggttcatctgcatgaccaccctaggcaggaggcatgttactaaccctcctttcacagagttggggtgctgacataggacagtttggcactgccactaccttagtggccctggaggagccaggattgatggggggcagccttcagagcccaaccctccaccccatcctctgtatcaccttggaaccagccccccatggagacctggtataccccgttgcctggagagtccacatttctaatccttagccatcagctctgtgacactggaccattttgtggcctgtgtgacctttcctacctccataggagggagatgccaggtccatctcatgagggcctggaagacccagcagggtgatccgtgtccctgtgtatggaggcaccaggctctggaaacaccaaggcttgctggcttgctcttatttattaattatttattagttataattatttatttaattaattatacttatttattaatgtaaacacatcaggccctgctccgccaagcagaccccagtcctgccagagctgccctcctgctctcctcctcctcttctggtccctgtgaagtgacctgcctggctgctgatatttgggaaaggtgagttgctctcccaaccccaggctccagaggctcccggcggggagactgtcagatagcaactccatgttcccgacgcatgaccggacctccagagccagtggtactcatttccacatggccccggctgttgacgatgaccttaagctcccctgaccaatctcctccagaatctggcccccagatgtggagagggccggccgacctttgcggcagtcatttttccatcagaaggtggcttgatttgatgggttttatggttttgtttagatactttctcccctaatggtctttacatttcttatgtgtggcccaagatcttttggcaaaaggcaggctttaaaaattgaataaataaattatggagaatggcttatttaaagctctgttaggctgatgggggagagaggcggcagtgaacgtaagttaccggctatcgttatttattaatcaggtgttggtatgattggattacgccgtatcctatttaatgcttgggcagcgatgaactgatggggtttagaagtaagttgttctgaggataggccttctgcagcctgcagcttcttctcaggttatcttattcttttccatcttccctcagatacaaagaagggattatataacttgttttatctagttcttatattttaagataaaaatggaataccagtgctgggccgaaggctataaaattgtgatcaagagtccgtaaaattatagaacttatgttttcttgagaagagagaggattcacaatgactttttccttaaaggtgctggacacttaaggactgacccgcacagacgtgtaagatactcttccatgtggagcaaaaaaaatagagttatgtgcttgaaaggttaatggctggtaaacgtcaattttcttcaatcctggctaataaaaatagcttataagacataaaatgtcatgctgccaaaattacaggggcctttgaaatccattttgaagtctcgtatccttcgtaaatggtagtggggtgggggtagtgtgagcttcaagtgtttttttgtcatggttgagtgatggcacctttgcggggaggtcgaggcagctctggagtggtgaggatgtcttcctgtcttcctctggggtgtttttgggttaaacgtttaccatcctctggattcatagtctgggaaactttctgaggcacatctttattgcggtcgatctagccgccctgacacacttggaccctacggggcaatgttaaatactataagcacaatattctctaaaaatctcatttctaaatatgatggcagtgacaggcttttggtagaatccctgacattagaatgggtctgtcttcactttttgggttggaatttcagcacgtcaagattttggaactctccagggttttaaagggatggactggggggctgggagaataaggacttcttcctatcggcatctctacccccatggccccatctcatctgctttacttgggatgcaagtttgaggggacagcgcaaaggttctgcgacgagagcaaatgtggagagcctggcttccgaaataattgctgatcgtgagttaatttcccagtgccctttggggctggcatcctctgctgtattaaatccagcccattgacaatggcgctccttcttcctaagtgatagaagacagccctcagcatccagccctgctgagtcagcacagcagagaggacagcgggctgtctttgtcatttctttgtgagcagaggattaaattgccctgtgggctggcacggagccacaggccgtggctttgcatcctacaacgtgaggccccggcctgggggttctcaggtctgtgctcacatcccaaacatctcccacgctctcccccggcctcttcttacagcggtgcgtgaagccacgtgaactgaacatcagaatttgatttttccaccccaccaacctggaggttgtgccttaccctgggcaagtgagagaaggtgcccctcacgagatggttctgtcacaacgccatggtcctggttttgcctttttgcaatggaaagatgaaaacgaggtgtcgctgagctctcccctcaacgtgccaagattctgttttcggggataggctgggactccgggctgacccacatgggtttgcacgtgctatgtttaaacaaggcagctcgctgattgggggcagggtgggcagggagccgtgtgcatggaggacggccagagagagcgggggaccgggaggcaaggcgctgctcttgtacttggtggcttccttctttcacttaaaattgtgtcattaatggcttttcctccttttacaaaagaagccccaagaagagttttttcatgccaggcctcctcctcctcctcttggcagccccgaggctgcagcctgctggcactcaggattgtcagagacatgccccattgttggattctaaaaggaggattctggaaggatatcaatctccgacttgcacataaaaagtcccccagtggctttctaaggttgtggcttcaaggaggcactaattaatcacttcctccagccccagtggaatggaggggctacttctgagatagggaggctgcagtcgccccctgtctatctgctcctctctgccaggcagaaaattacattatttcctcattttgaaaggtgcttgttttgtcaggaagacatcccttccgtgcagttatctaggaattgtcttattgcatttctcccttatcagttttgaaataatattatttccttcttgcttaaatgccatatgggtcaaaacttttgttgctggaaaatggcaccatcaatgaatgcattgtttgttgcagaagttcctggtcaccctcagaggtgataaatgcccagtttaggggataccatgggcagtttgagggagtactatgcacagtttggggaagtaccctgggcagtttggaggattactgtgtgcagttgtttgggggagtactctgtgcagtttgggggagtaccatgcgtagtttgggggagtactgtgtgcagttttggggagtaccatgcacattttgggggagtactatgtgcagtttgggggagcaccatacgcagtttgggagagtaccatgcgcagtttgggagagtaccgtgtgcagtttgggggagtaccgtgtgcagtttgggggagtaccgtgtgcagtttgggggagtattgggggagtaccatgtgcagttttggggagtaccgtgtgcagtttgggggagtattgggggagtaccatgtgcagtttgggggaggaccacgtgcagtttgggggaggaccatgtgcagtttgggggagtattgggggagtaccacgtgcagtttgggggaggaccatgtgcagttttggggagtaccgtgtgcagtttgggggagtattgggggagtaccatgtgcagtttgggggagcaccatgcgcagtttgggagagtaccttgtgcagtttgggggagtacagtgtgcagtttaggggagtaccgtgtgcagtttgggggagtattggggaagtaccatgtgcagtttgggggaataccatgtgcagtttgggagagtaccttgtgcagtttgggggagtaccgtgtgcagtttaggggagtaccgtgtgcagtttgggggagtattgggggagtaccatgtgcagtttgggggaggaccatgtgcagtttgggggaggaccatgtgcagtttgggggagtattgggggagtaccacgtgcagtttgggggaggaccatgtgcagtttaggggagtaccgtgtgcagtttggaggagtaccgtgtgcagtttgggggaataccgagtgcagtttggggaagtaccatgggcagtttgggggattactgcgtgcagttttttgggggagtactgtgtgcagtttggggcagtactgtgtgcagtttgggggagtaccatgtgcagtttgggtaagtaccatgggcattttggggaagtaccatgggcagtttgggggagtactgtgcacagtttggaggagtaccatgtgcagtttgtggtagtaccatatgcagtttgggggagtactatgtgcagtttgggggagtaccatgtgcagtttggaggagtattgtgtgcagtttgggggagtaccaagcaccctttaggggagtaccatgtacagtttggaggagtattgtgtgcagtttgggggagtaccatgtgcagttttggggggtaccatgcacagtttgggagagcaccatgcacagtttgggggagtaccgtgtgcagtttgggggagtaccatgtgtagtttggggaagtactgggggagtactgtgtgcagttttggggagtactgtgtgcagtttgggggagtattggagtaccatgcgtagtttggggaagtaccatgtgcagtttgggggagtactgtgtgcaatttggggagtaccatgtgcagtttgggggagcaccatgcacagtttgggagagtaccatgtacagtttgggggagtaccatgtgcagtttgggggagtaccatatgcagtttgggggagtactatgtgcagtttgggggagtaccatgggcagtttgggggattactgcatgcagttgtttgggggagtaccgtgtgcagtttggggggagtactgtgtgcagtttgggggagtaccatgtgcagtttgggggagtactttgtgcagtttgggggaagaccatgtgcagtttaggggagtaccgtgtgcagtttgggggagtattggggaagtaccatgtgcagtttgggggaataccatgtgcaacttgggggagtaccgtgcacagcttgggggagtactgtgtgcagcttgggggagtaccgtgtgcagtttggaggagtacggtgtgcagtttgcaggagtaccgtgtgcggtttgggggaataccgagtgcagtttggggaagtaccatgggcagtttgggggagtactgtgtgctgttgtttgggggagtactgtgtgcagtttggggcagtactgtgtgcagtttgggggagtactgtgtgcagtttgggggagtaccatgtgcagtttggggaagtaccatgggcagtttgggggattactgcatgcggttgtttgggagagtactgtgtgcagtttggggcagtactgtgtgcagtttgggggagtactgtgcacagtttggaggagtaccatgtgcagtttggggtagtaccatatgcagtttgggggagtactatgtgcagtttggggaagcaccatgcgcagttagggagagcaccatgcacagtttgggggagtaccgtgtgcagtttgggggagtaccatgtgtagtttgggggagtactgggggagtactgtgtgcagttttggggagtactgtgtgcagtttgggggagtattggagtaccatgcatagtttggggaagtaccatgtgcagtttgggggagtactgtatgcaatttgggggagtaccgtgtgcagtttgggggaataccgtgtgcagtttgggggagcaccatgcgcagttggggggagcaccgtgcgcagtttgggggagcaccgtgcgcagtttgggagagtaccgtgcgcagtttggggggagtaccgtgaagcagtttgggggagtactgtgtgcagtttggggagtaccatgcacagtttgggggagtattgggggagtaccgtgtgcagtttgggggagtaccgtgcacagtttgggggagtatcatgtgcagtttggagtactgtgtgcagtttgggggagtaccatgcacagtttgggggagtaccctgcgcagtttgggggagtaccctgcgcagtttgggggagtaccatgcgcagtttgggagagtaccatgcgcagtttgggggagtaccatgcgcagtttgggagagtaccatgcgcagtttggggggagtaccgtgtgcagtttgggggagtaccgtgcgcagtttgggggcgtatcatgtgcagtttggagtactgtgtgcagttcgggacacctgactgtgcttttctgaaggatcctggattctgagtatcactgggggtggaagcaaacacttatctactgatttgctaacatattgcactgttaatctcaacttgccttctcccagtggaactgctcttggtgagactgtagcttctctctaggaagtgatttgatttttgatgtaaggaaaaggattagtgtggctggattttgataaggctggccgcctggcacatcagcgacactctcatcccatcagtatcactgacagcgggttcgttatgcaggagcactgcagagcggtgatacgggacgtgcagagataattgtagttttgctatttaaaaaataagtctagtgctttacaatgtttaagtgataacctgtttagaaaaactcacagtgcctgtcttttggcacagaaaaacctcttctagcagcttgacttggattttattaatctatttttattttcctgagtataaattgaagtctcatttctgtttgaactcttaagctagaacttaagaccggaagtgcacatttgcactttcaaactcaacatatttccaggggttttatagcaatgttgggcttatgcctttgcttttcagtgatctccagctttgagattagatgcacttggttagactcaatgtaagtagcttgctctatggtgggtgttttttgatcaaggtgctaatcttggtgtttacctggggttgtgagaagagaggattaggaggccgcacttgagcagtggctaaatcccatgctatgtcgctgctgtctttctgtccccaccaggagaatgacagggccgtgcctggcatccctatgccattcttgggatgatgttctgtgactctctcactggctttgctgcttctcttgtggccaagtcagctgttttgatgggatggacatccatggaggccaagaatggtggtcctgggcagtggagattccatcactgtggctctaagaactccacggggtcaggggctgttgggcagagggaggcacaggagccagcaagatgctgcacttttcatgaatggatcacattgttcattgctgttattggggttttacttcctagacacctgtgggttcctggatatcaaagtagttgtagtcatctttgtcccattcagcaggggatcctagagactctcaggttctctaaaagctttgaaggctctgctctatgcagattaaagtccaagtgcaccattccaggccctccatgcagtggtccccaggcctctgtccctttttccctgtcacacgcccacccccttctaggcaccagcactggtctgcctgctgagcttgctagaacttgctagcccttccctcatgtgttcctttgttttggctgccacctctgactggcttgccatttcccctgtgggaatcttccagggcttctgaatttaagagttactcctccactgagccctcttttgcgtcctctcccttcccctctacctgagctaagtaagatgaattatttccacctcttttgtctcagttttattaaagtgtataatgatataatgtttttgtactctcttctgcgtcttcctaaattgtggccttgttgtgactttgtgtgtgcgtgtgtatgcatgtgttagatagcagcgagagaagtgtgaggggtgtgtatgatggaaatggggagagagaaaactacctcagtgcactcacatgaagccttcttcccaggagggaatcttcataatgaaaaggagaggagccttctcccacctcgtggagggggtggcagtggtggaaggctggaactgacaagcaaggaaatatgaaaggattataattggaaaaagatgggcataaaatgaaaaagccaaagtatgttttattttgcacctgtgtattcgggcttgctcggtttatttattaagccgttatcaaagtaaagtaagacaagtgagtcttagtctaatgaaattgcccctctgtgggccatgttggcatcaggtatccagagcataattggataacaatgacaattactgtgtcgggagtttcagcactggacggcctccgctttcctgtgctttctgtgcggtgtagctcatgagcgttctgatggagcaggggagggccggcttttccagctctggttccgacttggaactgcagggtgggtgccgatcgggcctaatgggccctcacatctcagcccctggcgttgatctcagattcagagcctgcgttatggcccaggtgaaaagcacgtctgttgccatttgataaactttcactcagtggcagtttgcctgctccgggcatctgtgagccaggcaattgtctgtcttggggtcagggggccaaggagccccacctgtgactcctgcttcattttttaaagtatggactcattgcttctcctgccagccatccttccctgagtaactccattgcctgtatcatttcactgctgagaattgggcacctctgtaaaaattatattgacctgcaggaactaagatctgcaagtgcctgtgtgcttaaatgtgcaggaatcaaactgcttggctgataaccttttattgattcatctcctttcactgctttgatgagcctgaggcctcctcagataaggaatggatgtgctggtgttgtggccaggcatggaagttctgactctagatgttaaaatgatgtgtttgcagactgaggacatgcacctttatcacggtccgtggcgacctcaggctgtggcccatctggctgcatggtgcagctgccccttctgctctgagaggcagaggccctcttacgcctggtgctcagcccttgggaagtggctcagcttccctttagagtctccctgaagtgtctacaataattgttctgagaatgttcaaaatgcaagggaaatagaggccatttggcagggactttgggagagaaggggagtggtccatgcaggatcttttctcccctcgagaacaaggagctgagactttgctggctccccctccccagtctgtgggagcccagtggatagaggaagagcagcctcacagcagtcaggcctgcctgggctggccgtgccacttacctgggaggagttgatttgagggacttctcttcataggtggcaatggcaagtattcttactggggagattcatgattgacttctggaggctttgccatagcagggttcattatgagcagctgaaagtggatgcatctgccaggggagctgggaccagcgtgctgagagtggaggggctttgtggctcccttctctcttattctaagatcctccccacaggcctctattttgagggatgagaagccaagtaggcatgactgacgttcctgagagctgccccattaaagtctccgtcacagccttttattaagcatgttattaaatgagcatctgggaacattctacgtggtgggcagagccaggctccagagggacacggcgaggcactcatgctgtctacctggccataaccctgccccagtggggcttcctggactccctcccacccacttggctagaactcattggccctccttccctttctttggttagcacctaccgagcctcctcccaggcagcaaggaaacctcggccttttcccagaggggcctggcagcccctgcgtctctggacctctgctttagggaactggccctggggtttgtgttaccctctttctccagcaagaggctcagctcctaggggtgggggcggggccttccatttcccacagtcacccatgggcgctggcttcctgagtgggggaaggctcctgcatcctctgtctagagcaggtcaccctcagtgtccccagggatgggcctcgacagcagggagcagtgaagccaggactgggggtctccacgaaagcgcagaggacattgtttcccgggaacgtagacatggcccatccttccaatttccgagaaatggggcagtctggacctcgatgtgcaagttccttattttgtgacgttctgtgcaccaagcacagcacatctgcaggctgagctgtgggcggccaggtgctgcctgccggctggggctgttgtgagtaacggggtgattgcacagatgccaggatttctgtgagcctgccctgcttgaagatacggatactcggagggaaaggggacatcttcaccagggcctgttggttgcaaggagatggccttctcaaggcagtggagacccggcccagtgttagctgactccatcggtggggttgcctgcagctgtgtgggtggggcaggcgggaatggctgtgaagtgcggggcctcccaggtgggactgggaactcacccaccctgggctgtgagtctgcgtctgccagccttgattgggtctgccaggctgggtggggtgaccctgggctgtgtgtgggatgggctctctgagcaggatgggagggtgagaattcagggccagggtacacatagggtgatggtgcggggagttgcatgggaatgatggcatattttcacctgagatgcccaggaaggtggaaagagaggatgtgaactgccttttgttcaaacataggctgttagagccagaagccacccaagcagccaatccctctctggcgcctcccaaggcgggggcgtgtgacgcgtgtgaggacgccaggtgtaggccgcggcacacacagcccctgccttggaagacggtgccctggtaagttctcttccaacatggcggtgggggccgatgtccccactctcacgaatcttcctttttcctgtggaaggcaggctccaactagaaagccagggtttcacggctgtgaaaaatactgtgtttatttataagcacaaggctggggtagtgatataaagttccctttcagatacacggacttatgggaaataatggagccaattaaaataaaagcagaggccctgacatctagtgatggggatgtgggggcagcacagttccagcacccctgggctaacgtggcttatgcagcatccctgcgtgtgaagcgccggccacagcggcctccctggtggggggtttcgatgctcttgagtccctaacagctctcacctcgctaccctccctgttcccccgagtgaaggagagtaggtgtcggggtccaggaacagctcaccctgccgcccgctgcctgctgcgttcctctttagggtggctttgctttctctttttgtctccactgctggctttccattttccagggtgactaaatgtttcccatttaagttatgagttattaaaggaaactaggagggacataatggtagaaatggcctgcagatggggcctaacgcctggctggggtcagagctggcactggaattcgggacagcccagacggagaggaccgtgcttggctctgtcatgggcttatggcctgggaggctccagcgggttctcaccaagggccgtggtctcaatgttggagttctccccagattcctgtgttgaaatcctcactgccaagctgatggtgttagcaggtggggctgtggggaggtgagtaggtcacgaaggtgcacccctcatgagtgggatgaatgcccttacaaaagggaccccagagaggcctgcttctccttcccccatgtgtggagacacagcaggaaggcaccatccgtgaaccaggaattgggccctcaccagacacggaacctgccggcgccttgaccttggactgctagcctccagagccatgagcaaccagtgtctgttgtttgtgggccgcccaagggaaggagctttgtgacagcagccagaaagactgacaccaagtgctcctggtggtctgaggtccgtcccagccccgcctcccggcagccatacatggcccaagggagaagtcaggcagtcacgtgcacttgctgctgcctccaggatggcaggataaatcctcagtgttggggggcaaggctgaccacaaagcaaacaccaaaccaaagaggggcattcccgccacctcctcccctggaggggacgcaccccatccctgtgctttcatcatgaggggttatgaccatgtcttgtctgccatctgacatgattgcagacatgttagacacgaaagaaaacacactggctctgcagagttagcaagtcctggccatgattctgaatctatttgaatgttagcttgaaaattccaaaccgatgtgaagggagtggccagagaacagcagcacactgggggttgggccagtcagcagccatggtcacgttggaagaaggaagaatgcacctcggaagcacgcatggcatattgtggtttctcctaaaaagaaattcacggctgggcatggtggctcacgcctgtaatcccagcactttgggaggctgaggtgggtggatcatttgaggtcaggagttcgagaccagcctggccaacatggtgaaaccccatctctactaaaaatgtaaaaattatccaggcgtgatggtgtgcatctgtaatcccacctacttgggaggctgaggcaggagaatcatttgaacctggaagacggaggtttcagtgagccaagattgcgccactgcactccagcctgggagacagcgtcagactcagtctcaaaaaagaaaaaagaaattcacctttggctctatccctcttactttcataaaacattctgtattttcaaaatgccaaaaaaattattgttaaagactttagaaaacagaaaagtacaaagaataaaagggtaacttcatttccctcctctgaacaaaccacttttaatctttggcatggtgtgtgtgcatgtgtgtgtgtgtgtgtgtgtgtgtatgtctatctgtacttgtacctgcacacacaactggatgagcatggtgtgtgtgtacacatgtaatgtgttcatatgtacatatgtgggtgccttgtgcacacgtgtgtggctgtgggatgttcagatgtgcatgtgagttggtgtgtgtgcatgcccacaagcatgcatgtaaatgtgatgtgctgtgtatgcacacggataagcatgtgtgaaggagtgcatgagagtggtgcatggctgtggtgtgcacgtgtgtgcgtgtgatgcatgtgcatttgcacgcatgtgctgtggtgtgtgtgatgtacgtgcatttgcacgcgtgtgctgtggcgtgtgtgatgtacgtgcatttgcacgcgtgtgctgtggcgtgtgatgtacgtgcgtttgcacgcgcgtgctgtggcgtgtgatgtacgtgcgtttgcacgcgcgtgctgtggcgtgtgtgatgtacgtgcgtttgcacgcgcgtgctgtggcgtgtgtgatgtacgtgcgtttgcacgcgcgtgctgtggcgtgtgtgatgtacgtgcgtttgcacgcgcgtgctgtggcgtgtgtgatgtacgtgcgtttgcacgcgcgtgctgtggcgtgtgtgatgtacgtgcgtttgcacgcgcgtgctgtggcgtgtgtgatgtacgtgcgtttgcacgcgcgtgctgtggcgtgtgtgatgtacgtgcgtttgcacgcgcgtgctgtggcgtgtgtgatgtacgtgcgtttgcacgcgcgtgctgtggcgtgtgtgcgtttgcacgcgcgtgctgtggcgtgtgtgatgtgtgtgcgtttgcacgcgtgtgctgtggcgtgtgtgatgtgtgtgcgtttgcacgcgtgtgctgtggtgtgtgtgatgtgtgtgcgtttgcacgcgtgtgctgtggtgtgtgatgtaggtgcatttgcacgcgtgtgctgtggtgtgtgatgtaggtgcatttacacgcgtgtgctgtggtgtgtgatgtaggtgcatttgcacgtgtgtgctgtggtgtgtgtgatgtgtgtgcatttgcacgtgtgtgctgtggtgtgtgtgtggtgagtggatgggaggatatttccagtgctctcctcctgggactgatgccatgatgaaaatctgtgtaaaccagacagcacatctctcatcatttctttgtgatgggtcattagaagcaggattctgaatttctggttcagaagctctgttacgtggccctggatccacacatctaaacgatgtttcagaaaggtggtgccaatttatattcccagcaaggacactggctgtaccatgtccccactgccaccctggccctagttctgtcatgtgggcattcctttggacgtgcttcccaagtggacaggtgtgaggtggccccaatcaatcccacatttactcaattagtggagaggctgagcacttaaaaatctgcttagctttggccgggcgcggtggctcacacctgtaatcccagcactttggaggacaaggcgggtggatcacaaggtcaggagatcgagaccatcctggctaacacggtgaaaacccatctctactaaaaatacaaaaaaaaaaaaaaaactggcctggcatagtggtgggtgcctgtagtcccagctacttgggaggctgaggcaggagaatgcttgaacccgggaggcatagcttgcagtgagctgagattgcaccactgcactccagcctgggcaatagagcaagactccgtctcaaaaaaaaaatctgcttagctttcctcctttctttttttgtgcatcacgtttgtgtttgcgttttctactgagggtggtgggaatggccttgtgcaaacacagagattcactggggcatcggacatctctcttccacctacaaacacagcttctgggtctgtccagccacatcacagaggtcacatcagtctccggggctgtttgtgacttgtttcgtatagtcctggtgccttcttagagtttgtccctaagtgtttaacatatgcccaacacatacttataacatatgcctagcatgtgcttaacatgtgcgccggacagaggtgctggtgatgtgggtggttcagggaatctgttttatccaaggatcattagttatattgataaataggcaaaacccatccaaactggctgaagcccccaatgcaatgtttttgaaagggaatggggctttctagggcctggaaccaaacaataaaactttttgtcaaaggccagatagtcattattttaggcttggcgggccagatgtcgggacccactcacctctgtgacgtaggtgaaaagcagccttaggagatatgtacatgaatgggtggggctgtgtgccaataaaactttatttacaacaggctgcagccagattgggccttgagctgtggtttgtccctccctgctctgtaaggacacagccccttgctgctgcttctctactttatgcccccatttttgctctctgctcagcccagcctttcctgttttttttttttgtttgtttgtttgtttgtttgttttcagcacttagaggaaaacggcccctggccgacagccaaggctctaacagcctctttggccctcctagtggcattataaagtttggcgttattggcaccatttgacaggtgggaaaacagaccagaaagcccgtgtgacatcgtcaaggttacgaagccacgaagcagcagagctgggcatcgaacccacagctgcctgctcttgacactggccataggagtgtagcatagagcaggggcaggcatcgaacccacagctgcctgctcttgacactggccataggagtgtagcatagagcaggggcaggacgggtccgaggccgtggcgcatgcctgtgagccacagcacccaggtatggagaagaaggaaagaggggaagcaaaactcagaaaacagctgaaaggcctggcctgtgcggcccctccgagcctgccacggagcattttttgccgggcagataatgatggcaccataatgatgactataataatgaaagataaaggaaatgaaacattattaaccattgatggatagtgtattcagttttcaatttaatgatctgcaactgcaaatctatagtcaagaatgaaccaatttctcacttcctttttgctctgttcatcccagataaggaaatgaaaggattactctgcagacatggaacccaaatgtcaatgttctgcctcattagaagacctggcgcagacgcccctgaaagcccacgtggttctggtgatgttgcccggctcacctggccagggggctggggatggccgtgggcacccacaccaacctctggcctcagcaggcaggaaaggcggctcagaggcatcccagatccggacacctgatccctctctgtgagtgccctggtgctggcttcttttccttcccccttcctatgaatgtgccccagattccatgtgttaagtattgcgctctggatgtgccagcccatcctaatgaggagcaagggatcagagggagatggtgctcagattgatggtgagttggccaaggtgagcattcatatctccttctcaatgcccttttgcactgaacactgagaggggatgcaacccagactcccagatctggccccgctttcttcccggcttgattagctggacaggaggcagtgcagggtgagagccttctgttcaaagccagacctaagtccagaggagtgcgtgtgctgggactggggttaatgctgacgagctgcctccctgtgtcatatggacttgaggacccacttgctttgcgaagctcacttgtccagctgtttcacacatgtgaccccatggaacctgccagacccagccaccgcagcttctgcggagggcatggatcaggcatgttctttccatgctacttagtgtggagggggcgtgtacgggtttcagttcagaagtcaagagtaacagctaatgcttttacttcaggagtgaaattacaagcaaacctcctgctcggcagctttgtgcaagtaaacatatgacagcgtaaaagctttttaacatccctgagtattgctctggttcacaagacgttgaaaactgaaaataaaacaatgagaagagttgtgtttgtcagcccagcttgcagggaagaatcccgaatagctgacgagttcatttttacttatttatgggcaaatttcaaagttgcatctgttcctattctgtgagcactcagacatcctctgggactttgtttgtttgtttgtttgttggtctctgtgtgactggcatttgcctgaagtttaatatcaagtaggccagatggaagaatgggcaagttaactccagagaagccgattgtcttaaacatactggatgtcacccttctcaatggtgcttcctggagcatttaatttgtgggacaggtgtctcagtgggacacgaatcccccagctgtgcagaacagtcaatggccacggactccaggtcccctccgtgccctgctccttggccctgaagctgcaggtcctctgtgagcctcagtgtcttcgtctgaaaaccaggatgagactcacagcagccttgtcatgtggtgaagtgaggggagcttgtgtgttggtgactttgtggggtgcctggcgggcagtctactctcagtgcacactacatcttctttaaaataagcacgaataggggcactcatggccagcttgggcaacatcgagagacctggtctctacactaatataaaacatagctgggtgtggtggtgcacacctgtaatcccagcttctcaggaggctgaggtggcaggatcacttcagcccaggaggtcaaggctgcagtgagctgtgattatgccactgcaccccagtctgggtgacagaacgagaccctgtctcaagaagaagaaaaaagagtgcttatggggtcctgtgagtggctgagccctattcattttctacagtggggtagcattcacaagggatgccccattgacttctgttccctccctgggcacaggggtggggtgggagcctggagtttggtggaccgtcacgggcatgcatcccaggctgccgaagaccctgcttaccccatgtggccctgggcctcttgctggggtggtgcactcagcatggaggcggggagagagagtctgtgtctgcatccctgcctgccagccactccccctaagtgaggcttgtgcgtgagtcccgcacaggaagcatccattgtgggaataagaggcgtgcagggaccagcctcctggggttgctgtggaagaggagcctgaagccgggaggacaaggccagtgtccgggtggcactgtggcattaagctgcttctgttaggaaatgggtggttccttgcaccccagagtgtggtggaaatcagcacgagggctatgttatctcagtgaaatatgagttccacagcacgaaaggaaacgacagccaacaggatttggtagaacagttatcagccttggaaaattatatttatccaaatctgcttggtgaaagaaggctctggtctgtttttattctcacgattttgtttttaccaagtagaacgcattcctcaggagaggtctttgggcacaggatccagttacattttcccagaaaaaaaaatcccttttcatgggattggctgtattttctgagtgatccacgaaaatgaggatttctcaatcttctggataggcccccaaagttgaactatgtaacctgttagagctgaaaacatcatgttgttcgctcttggcagacaacctaatgcccttgacagccagcgttcaaagcggtggccattggttgctgggtgaccctttgtccgcacttaggccagtcttatggatggctgggtctggagaaagcaggtggtcagaggctttgctcattcagggcatggcccactcagtgctgccaagagcccctgagcatgggctgggggctctgagcagttcctgatgaatgagctctgtgcagccaggccctgatgcccatggtggtctcagcaggcaggccagagctgcggttaccacggggccaggcagccctcctgctgcaaggagagggagcattaccgtcagaagcacaactttgctgggctgccgcggccggctccagacctcacagcacatgaaggtgccagcgattcgagcacgcctgcccggcgctgacgttgccggctgctccacaaagcagggcggccaaacaataaaaatataagcaggtttggcttttatctgtgttgggaggttcaagggtattccttgtcttcaggcaacaataaaatcatcatgttctgaggcggaagtcataggctttcgctcttctaaagtaaactggggcttaaaaggaaagtggcttatagagatcctattagggaaggaaaaaaaatgtttttaagctaggaattccttctctttctcaagcagttggaatgacagagcagtttatgaagcacactcttctttagaaggcagaagttgtttcttccctaaggccaaacgtaccatttgcagacactctgagcaagattctggggtgatggggagggcagaggagaacggggtgccccactgcaccctgccattgcttggtgggccttgtcctggcctgaacagtggcatgtgctgagcggcgtgctcccagctcctggcactgtcagctgtcagcacgctccctcagtctatgggtagggacaccaaagctcacaggatggagtgaccagcccagagtcccacatctgagccaggatctgacccagggtcatttggcccccaggctaagtcttctagccctgaagccctctcttctctgggggaggctgtttctgaaactctctgcctgctcgtgccaccagcgcatgccaacagtaaggggtacggggtgtcgccagcctgcagtgctgtgggagagaaacaatctctgttctggtgctgtgtgggtgcccaggggcatgagtgcctggggagtgtgaccacaggccagtggcagtccctgcctttggattaaagagccctttgaggcttgcttggtgatgtcatggaaaacagcatatgacaccaagatatccccatatccaacgagacttgctgggtttatccccgtatccaacgagacttgctgggtttatccccgtatccaacgagacttgctgggtttatccccgtatccaacgagacttgctgggtttatccccgtatccaacgagacttgctgggtttatccccgtatccaacgagacttgctgggtttatccccgtatccaacgagacttgctgggtttatccccgtatccaacgagacttgctgggtttatccccgtatccaacgagacttgctgggtttatccccgtatccaacgagacttgctgggtttatccccgtatccaacgagacttgctgggtttatccccgtatccaacgagacttgctgggtttatccccgtatccaatgagacttgctgggtttatccccgtatccaatgagacttgctgggtttatccccgtatccaatgagacttgctgggtttatccccgtatccaatgagacttgctgggtttatccccgtatccaatgagacttgctgggtttatccccgtatccaatgagacttgctgggtttatccccgtatccaatgagacttgctgggtttatcccgatatccaatgagacttgctggatttatccccgtatccaatgagacttgctgggtttatccccgtatccaatgagacttgctgggtttatcccgatatccaatgagacttgctggatttatccccgtatccaatgagacttgctgggtttatccccgtatccaatgagacttgctgggtttatcccgatatccaatgagacttgctggatttatccccgtatccaatgagacttgctggatttatccccatatccaatgagacttgctgggtttagcaccacagatgccagtcacagaggaaattgatggcatggcagacagcgtgacatgttgactacctgccctggtccttgcagatggcatgggcacaaaggggatgtggggtgaagagttgaaacgagtgccttctccagaagatggcacaggtgtaagatgaagacagccccaatttctgtgtcactggagagaagaggacccagccacccacagtgggctgtgatgtgggggagaaaggacctgctactcttcctagcctctgaggtttaggaatggaactgttacagaaaggagccttaataacccaaaccaataaaagtgggccatattcctgaaaaatctaagggtctgatgttagcttcaggcatggctggatccaggagtccaaacaccgttatcaagagcctgtatctttccatctcttggcttggcctttttttggctcattctggggtttggtttgttcgtttttcttgactttattctctagctagatcttccctcgtggggcatctgtgtgtcccccaacccctgtctcacactcagctctgtctttttggctttcctgcctgcaccttggcagtccctgcgagtgagaacctctcttttccagtcatcctcccccaagtcctgtctctgagtctcactggcctgactcacaccttgtagtgagttgaatggtggcctccaaaagatatgtgcacccagaagctgtgagtgtctttatttggacaaaagggtctttgcagttgtgattaagttaatgatctggagacaggatcaccccggcgggtcccatatccggtgacaaggcacagccatgtgaagacttgtggaaagaacgagaactcaagacagtaccgtggtgtgtgggccctgggcctgctcttgtggcaggaggtcacatcttacaggtacccgttagctgtgtgaccccggacaagcttctcaccctctctggacttcagtctcctccagagtaaggggggataatggagtgcctccttcatgtagggtgaaatagctaagaatgcaaggtgctgcaaagactgccggtcggcaggagctccctgagagcctttgttcctccctaaggcagtgtgccacaaggccaaacatgcgggcacccgcgccaggccaccaggttaccgggggtttccagtctgaccctatcccagtgacttatggcctcggagactcggtttccattatcttttttttccacttttcctttaggttcgggggtacatgtgaaggtttgtcacacaggttaacacgtgtcacaagggcttattatacatatcatttcatctcccaggacctaagcccgatacccaatagttgtctttcctgctcctctccctcctcccaccctccctgctcaagtagccccccgtgtctggtgtttctttctttgtgttcatcagttcttatcatttagctccctcttataagtgagaacatgcggtattcggttttctgttcctgcgtaagtttgctaaggatgacggcctccagcttcatccatgtccctgcaagcagtatggtgattcctcaaatagctcaaagcagaactaccacttgatccagcaatcccactactggatatatacccagaggaatgtaaatcattctaccctaaagacacatgcacgcaaatattcatggcagcactgttcacaagagcaaagacatggaatcagccgaaatgcccatcagtgacagattggagaagaatatgtggtagatatacaccatggaatattaggcagccagtttccttttctgtaagtaaggactgagatagtccctgcctcgtggagttgataaggatgtgaaacgcatccaccccagtcctttttgagtgggcactgctctttttattagtatgatttttcttccattgccatcctctggtctagtctagtggttctcaaagggggcaagtccagccccaggggcactgggcaactactggagacgtttttggttgtcacagcttggggaggggtgctgttggcgtccagtggatggaggctggagctgccgcagaaggtgctggtgggcacaagacggccccaccacagaggacggcccagccccagctgccaacagcactgagccttggaagtgcggccagggctgacctgcagacgcacagcgcactcacgcccttatgcggagatttcttcctaacaggtctgctttgaggtgccagaaacacgagaaaatagagaaacttgggcaatgctgtttttgtttttgtttttgtttttgtagcaacctctgttcaatgaaggagttgagtcccaggaaactggcccctgagcagcctctggtatcagcagtccagatgcagaggtgcctctgtgccctaggagggaggaagccccacaaggcaggcagtgcctgcctgtttcagatgctgtcagcaggcctttgagtctgtgtgctgccggggtctgcggcgacctgcctaggggcctggctgtggctgggtgtggtccccacgctccccgaggctcagggctcccctgagtgtagccacttccgcagatcccctgcagctcccatcaggatggtggggacctaggagggagggctggttccttcagagagacagggagacttttgctccttctagctgtccccacatgaacgtagtaggacttggcctgcgggttctagctctccccacatgcacgtagtgggacttggcctgtgtggatgcagagaggaggatgagggtggatgagagtggtctcacagctcctgggacgggtggcaggaggacccgtaggacagggaggtgcagagtgagggttagtgcacagttaccccggtatctggtcccatgggttcacagagtcacgtgactacagctccgacccctggctggagaggccccaggtgcccggcaggcgtgcggggacttctggggaaggaaggtcagtcactcaaccaacacttgttgagcgccaggcctggactggtcctggggacaacagtgccaagaaagtcaagtcccagccctgaaatagccttgcatgtgtccccatcagcgggacagagagacacatttttaaagcctagagaccctgggtgtgacttgtgttagaatcctctttctccaagcctcggttttctcctctgccaaatgagcacagcacctcttggagggaggtgaggacctcctaaattatgagcccttcagcctggaggtgctcttgctgaggccaagaaagagccattgttattgaagtgaggggagaggaaggtgcccagagtgcctgcttcttcctggcccctcaccagggtggcatcctggggtgggaggtggttttttgagaactgttcggcagtgccgggttttgcgggtccactttgtggtctggacatgcccgtaggcacagggaagctggtgaggtgctggggggtcagcatgggggtctttgtggtcgtttccttctgtttcacagtgtggagaccccgggacaggtgaaggccccggcaggacaggtggtcagtgtgggtggagcgtccgcaaggatgctggcctggctctgaccttcacagagaacccacgtcctcatgggtggtggtggcttcagtcagactggccgggccagccacccccgcactccctgatcctgccggcatcatgggctgacctggaggctggggggtctgcccgtgacaccagccctggttccctgagctggggtctgcaccggggccagggctgctgacctgctagagcccaaggccaaaggtctttgaggtgggtctggggcaacgggggtgaagtctcatgacctgccatcaccctgccctaagctctgtggtctcgccatctgggagggcagcagtcaaagtgcactgagatccccccggggcagggccccgactcggcccatcctactcacagctcccagaggaaacacagctgctcttcccatcaccctccaccctatgcccctttaatggacggctgagtggcccggaaaggctgcagaactggcccacggtcaccatcttcaggggacaacatggttcattccactgtgggaccccacacatgctggacactgctctttccccaggccttacacctggcctgtgtcgctacacgcagggcccctgtcgcccactccagcagcctggagcctgtgagatgtgggcattgatgtcctctgggccgccctggggaaagctgagcccctgacaacagagctgaaagctgggacccttgtgtgtgaggcctgaggacaggcaccaggctggaccaaagctcccgatctggtcacggcgctcggtgtgagttcacagggcagtgattctaaacctggctggtgcatcgggcacagggtcacccactgatcccaaaccccacccgagctccaccaggcccaggcctctgccccaaaaacacggctgtggagctgttgaggaaaaagaaagtgagcccgcgagaatgtccccttggatggagtctctgtctggccttgcaccctcaatatcctggtggaaaacagcctttggggatgactttgtcgaaggcagggagtgtcatgggagaatgtggcgtaattataaacacatttgcatgtattgattatttgatgaatcaggctgttgtacgggaggggaagaatactttgtttttaaaaatgcacttaaagcactgtccctgtttcctggaaaattttttaattttgctgaggttgggacatgtttactgatgttttacatgtgatttttatggataccttgagttagaacactgaccatgcggtattgagggagtctggagtccagcacccgaaagcacactggcgaagggtgtgacctcaggctcacaccccgctctgttgtctgccaggggattgcgacatttgtccctgtcacctggcatggctgtgatgctgagatgcagttgtggatgtacacacactgcgactgttgcggagtggaagtaatcagtagcaatggccgcaaactccctttggtatctctgatttcaatacttatcagtatcgaataactccaggaagttgcagacttgcgagtggccctgggcgtcatcctgcggttcatatttctcggtgaggaaacagaggttgtagaatgtggccagaagcctggtcagcagagtggcctgggcagaggctgagctggataaatggcagctggggaaaagcggggaaggaggcggtggccaggcagacccctgtcccttaccagctcctcgtgcccaccagctgctgcccggcctgtgtccactcactcactccccagggcggccagcagggtgtgtcctggggtccccggccggccggaagcagctgcctccctctctggaaggtgctttgaagggagctgacaccagtggacagctgtagagtgagaaagtgccatgggtatcgcggaggccgtgggaacacgtgggagggtctacccccgctgcaggaggtggttttcaggaggacggagaaggggtggggagtagttaatggccgagccaggacggtggggcaagggggagtggcctgcgagaaggagagcggcttctaggcagcaaggtagaccagatgatccacaccacatcaagggttggatgtgctggaactttagagttgtcgaaataagtatgagtgtgtgcgtgtgtgtgtgtgagagagagaccttagagttgtcaaaataatgagtgtgtgtatgtgtgtgtgcatgtgtgcgtgtgtgtgtgtgcgtgggtgcgtgtgtgtgtgtgcgtgggtgcgtgtgtgtgcatgcgtgcgtgtgtgtgtgtgtgtgagagagagatcgatctactacctgcctgactcttttctcagcactgcaggccacgggccatgcttgcacagaatacacacttcaggcagggctgggcctgcctgaccctggatctcaaagttttttgaccatgattcatagaaaaaaaatgctttaaaattatgggccaggaaataccccccaaaccctccctccccacagaaacgtccccacacacaaacagaaatcagtgttttgcagagcagcatttaccgcctcgtaaatgttatcgatacaattagaataggtactttttttccattctgttcgatttcattttaaaatgttcaccatgccacacgaaactggtgtcccaggtttgagaagcgtgttctggaaggccagacccaggcgtctggggtgatattctggaaagagcaggcatggccgaaggtccctgaactgggcgtttcaggccacggcagctggaagggtgacggacggacgatgggcaggtggcgtcaggtggaaggagggacgggggtggagaatgggtggatgggtaggtgggggacgatggatgcctttaagtctcttcatagtggttactgtcagctgacttcctggagctgctggctctgagcgacagaactgggagctgaattaagtgagagggaccccaggactccaggacttccacctgagcttcagaggagcagttctgtctttacttaccatgtattaggggttcctaacaaggatccctctcttaaaaagtgtggaggcaaggagtggtggctcatgcctgtaatcccagcactttgggaggccaaggcaggtggatcagctgaggtcaggagttcgagaccagcctggccaacgtggcaaaaccccgtctctactaaaaatacaaaaattggccacgcacggtggcatgtgcctgtaatcccagctactcgggaggctgaggcaggagaatcgcttgaacccgggaggcggaagatgcaatgaggagccgagatcgcgccattgtactccagcctggacgacaagagcgaaactccatctcaaaaaacagaaaaaaaaagtgtggaaaagtcctggccttagggtgtgaagaacaccctatatttggtataaagtaataccctggatgaaggttttgctcaccatgaacatatctcagaggcgaatccccatggtccatctgtgtcttggggcccctgggcgtggcccactgacagcccaactcctgagggctgggcagcagctgtttttccaaagccggggcggtgcctggcacacagtgggcccttcagaaagatttgtcgattgcaccaagaagctcctctgtcctgccacctagagcaggctggattctggaggccttgcagcgcactttcctgccctctcgcgtgtatgatagagacattagcgcgtgtcagcccctttaccggggcttcccattgtcttagcgtgctcctttcatctaatgagcaggcgcccttggctgaacttttcaggaatccgtggggaaccagagtgaatatattatggcgctgtggagcgaatgacaatcgggcagtgctcgcctgtggccgtggaggtatctgcgccaccgcaaaatgcctcacccttcttttgggttttggggtttcaggtcagctctgggggcccgttatcccgtgtcaaggaggcccacgcaggcacccgaggaaggctttggctatcacgaggtggcctttgtgcaggcgggttcagcaactttggcattcattggggcagcctgttactggtgcttggagtaagtgaagagtgcgattgggcgccagagctgacctggcagggagccgggtttccggcctgtgtcagcggctgcctaaccgtggacaccagcacgatgactcagtcctgaccgctataagcatcccggccaccagctctgcatcatcagggagatcaattaaattgagtgtgtgtaattctcggggattagacggaagtgcacaggcttcattgatccactctcctagacaatcagcaggcccctccaagggctgaggacccaccactcagcaggaagcctggctcacttctcccccacaccccttcctcccgcacttccccacgttcctctctcctggattggatttctggaaggttctgctgggccacgtcccgtcaggtcctcaggaacacggcatgcacaaccacacaccccgtctgcaggggctgcaggtaccctgaggccctgggactctgtgtttttctgtggttaccacttttcctttgaacaataacattttttttctgagacacactctgagacttctggcacccaccgtaccttctaattctactataatcatcacccttttctcttgccaaaaaaaaaaaagaaaaagaaaaataaacttaaaagaacacagactgaagaaagtcatttccaagttaagctgcgaaggggtctgaaatgtatcgctggtgagagtctttttttttttcatggtaaccacaaaagcaagtgcactagtgtgtctgtgtatgcggtaaacaaaatggtttgccaaactcaggaactaaaaatgctctaaaagaacagagttcatttctgaaaacagccaatttggaaccctggcaccagtattttgagtcagaagatcactgagcattatgggttgaattgaatctcccaaaatgccttttgctgaatcccaactccagaacctgtgcgcgtgatcatatctggaaaaaaaatggggggtctttgtagatggaatcaagttaagagacagtcagagtggatcagggtgggccctaaatccaaagacccgtgctcttataagaaaagaagaggaaaccgaatccagtgttagacagaggccccggggagaacctcgcttattcgttcatcacggagcagagatgggagtgatacatccgcagacaggagccccggggactgccacagccccagatggtgagggctcctcccaatgggtcccagagggagcacggccctgcagacactctgatctccgtcaaactcctgggctccagaacagacagaatccatttccattgctttaagcctccaggtttgtgatactttgttatggcagccacgggaaactgacacattgaaaatggcaattttgaaaagcccagaaagcaaatatgctggaagaaaaatgttgacttagatgtttcttggtaacctgacttcttagtaactcccagaagtgacttttttgaaaaggaggttactcctgctagggctgaaagttctctgttccaagcttgccttgtggatggaggagctgcttccttgcagaaactctggggttaatatcaggaccctggaaccccatgcctcacccttgaaaggcctccctgcaggccgggctgtcatctctcaagcctttcacactgctctgctgtaaggtcataaaaccgtcatccagatgcagatgaggaggactagcgccaaaaaacacaggctataaaagtgttagggccctaaactataagccataagtaacgccatagaagccgccagcacttccccgggggcatgacgcttacaggaggtgtgtggggttagagcctttgccagtgtgtccatttgtaatgatgtgtagaggggggaccaggtttggggctggatctcacaagggacattactgaaaatggctctttagggaatcgtgtgtatttcttcatccaacaaacatgaagagactcttctgcacgctgactggccatgcactggtgtaaaaacagagacgtccagcctgcttggagcttacggtggcatggggagggcgggtggacagctaaagcaggtggtgagatcccaggggagaggcaggtgtgccacagccaggcagtggggtcaggtgccagggatgcgtgggtctgaggccggggcaatcggcgggtaaagggatattaagggaacacttgaaaaatgagcaggagaagggccacatgaggggcagcatgttctgggagagggaacagtgcgtgtggaggctccgagccctcagctgctcccgggaacctgggagtctcggctgggtgggttgctgctgggctccggcacagggcactctctgcagccaggcggcctctgggtgaagaggacagtgccagctctccctgggcacagggctcccctggctgcggccacagcccttgctcatcccccgtctgccctgccgggctctcttcctcgctgctgtcttcgcttcttcggcctggcctgcactggccctttggacccgtctcccgggtctgtgtcccctctgtccagtgttcctcctgccctgttctgcccacacaggacccctggcccccacacccagccttcctgctgccctctgggtgggatgtcccctttctccaggacactcatgggtcccctgtcaggggcgaggcagtctcttctactcccaggacaactgtctgtttaggtggaaaaacattggcttcctggcagagccaccaggaggtagggaccctgggaaacaaacccacctcctcctcctcacccttccttttggagcagttcaagctgtacaaagcccggagcaccagccatgggcggctgctccctcccccggcccctgcagctggcagcagggccctcccacctcctcacatgagctgctgggcagccgtggactcaccccacggttaatcccattaacttcaaagctcacgactcttacctcgcagtgtgcccggggctgcgcccaactccccatttgcagtgtctctgtgaaggtgccaaagcccatggccctcagcccgcttcacagatggaaggagcgaggctcggtttagcaaggtggttgccgtggtcactagaaagtgaaggaggagagctgagcctggcctgtctccacaatggatgcggtaaatgcctgagggctgctgtgtcaggcaggaaccaaggggatacagtgctggggcctttacattttgtcagtggtgccagcggtggtgccctgcccatatgttggccatttgggaaaacagcagccatgtttgaaaacacattgcccctttatttaaatgggcagctgctggtactcactggcctgggcgtgtgcattttgctgacatttggggcagacccttctgttgaattctcgatgcttcgcgaggcctcttgccttggtcatatgacctccagagagtttttgctgctttttaagtcgtttcaagcgattattctccggccataaaactcagctttaaaaataggtttcataaaggccccgacttttcttctaattagtgtaaagatttattgaatatacatcatatgcacagatcataatattattaaaattactattaagactttacacatcaaaatatttcaggcagtggggagacaggaagcctgatggtccctgagaatcgaatctgcattggcaagataaaggacaattgagggcgattacaaaagccatgatttagagtacaacataaaactctgctgagaactaattcgtattgccagctgctgctaagcttcttaatctttatctagttcaattaaaatctgaatgtttgggatttcattaacaaccgggggtttggaaattacatgcgcttttacgccatacttccgttgctgactgacaatattggaagttgcccaaaacgtctccaggtagacttatgtataattaaaacttaagtatttaaaggctaatgcaaaggtaaaagcagattgttttaatttgcaagtcagatccgactgacaaagtaaggagactccactacaaacggtgccccttttgtggggagagagagcatttagtaggccgaggtctgggcggtgacctgcagctcatggtcgagccctcaccacagggccggtttccgtgtgagggccagggagctgctttgggcatcttcttagccactggggaccttgtcacgttcctgtgtgtgcagtccgtatcctcactgtggtgcagatgtgtttgctgtctgccaattcattatgcgttttcaagactttgcaagcaggtctttctaaaattaaaccagccaaagtgatgaacaagcttaacgcctaacttcagatgaacggtgaaaagcaaaagcatccaggatgtttcctgtatgtgtttccttggcctgggttggggggggtctgttgtcacaaacgtcattcttcacaggagaatgggagggtctgactgaggttgggggtgggggcagggaatcggcattgttgtcccctccatccctcaagtcatcctgagactggttggtgcctcccatgtcctgcatggcccggagggatggctgcagcatttgggtctgtgtgagacacacctgtttcggttccctgagcatgggaggtagaacagggacccccaaagatgccccagtcctaatctctccacctctgaatgtctcaccttgccccgcagaagggactctgcagatgtgatgaaagtgaaggatgccgagatgggaggttatcctggttggtgccatagaaccccaaggtcccttccaaaagggaggccggagggtcaaggttgggaggagaaaatgtgaggagggaagcagaggttggagtgatgtgaaagaggccatgagcccataacacaggtgcctccagaggctagacaaggaaggattctctcctggggcctccccagcatggctgacacttggctcttggcccagggaaacccatatcagacttctagcctccagacctgcaagatataagtgttcacattaagccatggggtttgtggtgacgttacggccacagtaggaagcagatacaccctgagacccaaagcatgtggctccccttcctatgcctgttctctcagctgtgaaacaagagtggagagtggtacccaggcgttcttgtgaggatgggcgagatggtgaatgtgtcaccagcctgggtcaaggagggcgatattagccatgagctgctgctggggtggccttcctgctgctggtccaggtgcctggcctggtgctggtcaaggccacgagtcctctgcaagagccagggcaggggtgggggacagcaaggggctcgaggcacagccgtatccacgccctgccccgtctggccctgctcttgccatttttttccagctcctctggctgcccctcttccccttctctgcctcatcctcaccctcctgcttctcctgggttcccagcaaggctgcagcagcaggacagggatccaggtgggcccccaactggtcatcttgtgatttggggggtgtctgctctctccggtgccagctctcctgaagtcctcttctctctgccttctcacctccagcgccattgcttaatttccctgtagctcttttcaggggagcagggaggaggaggtaggagctgggctgagatatgtggagcatcactgtgcatctgtgcccacccccaggcccgggacacggaggcaccagtgggaggagcccacggaagtccagtggggcaagctggaaagcgagccttcagcagcagcctggatcccaggaggtccgatgggcacggtgccatcctgttttgtttacttaggcaacacgtgcacctcctcttaaataatagaggctacttcggaacggagttgacctggggctgttcttctgaaggttaacacggccgtagggataggctcctgccagtggcttcatttcacacgtttttctgggtggtgatgtccccagttctatgggaccctcaaggaacccgtgtcctggggcctgggaaggaaaaggccaggcattcctttcctcagctgcagatcaggaaactgtcttcacagccccaggcttctatgaagacgaatcctggttttaggtctttctctgcccatcctccgaacgcagttctcagcagtcagcattttggattgaagatagtggacggcacccccccaaccccccgttctttggtgtggtcgttataggagtgacttcctaggtaatcactgaagtggccagtttttgttattttacttcattctgatactggttttctgcgtcctagttttattatttcatattacattgtattgcttcataatggtctgcgtggttggcttctctaaacgatgagcccctggaggacaggacgcctttggtcgtgttgtgtgtgtgtgaatgtgtgtgtatgtgctgtgtttgttgtgttgtatatggtgcatatgctgtgtgttttgtatgttttgaactctgaattgtactagagggcctggctgtgccataacaatattaagaggcctagagaaaaggacagcagaaggggtgctattggcaggaggtttataaagtccaggagcaactagagacgatgtatttctagactatgtatgtactagagcctctgtgtgtgcagtgtgctgtgtgttttgcatgcagtgtgcatgttgtgtgtgtggggttgtgtgtgtgtgtgcaatgcatgtattgtgtgtggggatgtgtgtacagtgtgtcctttgtgttgcgcatgcagcacgtgtattgtgtgtgtgtgtgttcggtgcgtgtgttgtgtgtgggatgtttgtgcagtatgttgcgtgtgttgtacatgcagtgtatgtgttgtatgtgtgtgtgtgctttgtgcatgtgctgtgcgtgggtgtgtgtacagtgtgttgcctgtgttgggcatgcagcatgtgtgttgtatgtgtgtgtgttctgtgcgtgtgttgtgtatgtgcagtgtgttgtgtgtgttgtgtatgcactgtgtgtgtggtgtgtgctctgggcctgtattgtgtgtggggagtatttttcagcgtcatctctgatgttgagcctgactgtccgtaagtgtgtgtttcggtggatctataaacctgcctttttgttttgtgatttttgtttttctttgtctgggggcagagggggaagaaaccttccacccagcgtggctttcgagatgcagggccagtgcacctgccgtatcttatgcagcgaccttacagtcttcaggcatctagtgatcagtgtgctgtgaaccccctggaaatcctgctgaatgcggattcccactcccgggggaggtggggcctgagagtctgcatttccaacactttttctctatggatgctgctggtgtggggaccacacttttgcagcaagactttgaacagcctgaggtcctcacgacattccaagtccctggaccaattcctaagttattaaaaataaaactcccttgattcttttcaattctcttgacctcggttcacgaacctctctcttccccttggtctcagagcttcccagggctttggtggccatgagtttgtgcatttccagatgtcatccagctcaccgctcacgtgcacctaagtggctgggttaacatcaagatcgaagggagccaccttgatctggagcttgtcattttcatgaaagatgctgccacatcacaaatggatttggcaaatggctcgccaggagatccgtgggagttcagagataactgaaaatatgatctatatctgtatatttggcttctagagtgaagatcggcccacggattgatctgataggggtgataaatatatagtccctagttgctcttggactttgtaagccttctgccaatagcaccacttccgttgaccttttgtctaggccttttgatattcttatggcacagccaggccctcaagtacagttcagagttcaagatgggagtaggctgtgggtttcagatcctggccatcacgctcttgaaaactttgaaggcttctgtccatctcttcttccttgcttagggtttcatctcatctgttgattttaagtcttccaaaggttgctggaaagcatgattagatagatgattgtgaatctggactcaagaaattacctcagaatattatacgtaaaacattctagattcctttaaaaatgcagtttactctgcaagaaatggctgatttgctactgagtgatgccggtaagttttcttttttctttctttttcttttttttttaaacggagtctcgctctgtcacccaggctggagtacagtggcacgatctcggctcactgcaacctccgcctcccaggttcaagcaattctctgcctcagcctcctgagtagctggcattacaggtgcctgcctctatgcctggctaattttttgtatttttagtagagatggggtttaccatcttggccaggctggtcttacactcctgaacttgtgatccacctgcctcagcctcccaaagtgctgggattacagcgtgagccaccgcacccagccgccattaagtttttacaaacttttcattgtcatatacacaaaagcacacaagttgtgagtggccagatggtgtatcatctcaaaccaaacacacccttggggccagcaccgaccagtcaaacactggggcacggtccactctccctggtcctcacacccttccacctggatccactgcagacctacagctcagcgttgcctgatttcgaactttgtgtcgacagagccccacttcacctgtacgcctggcttctttcctgagccgtgtttggggagccatctgtgtcctggctgggcgggacttctcatttcctccttggtgtggctatgttgtaggtgggagggctagttcaggttcttaactttgccatacaaaagaatttgagagccagtccatagtgagagtaagcaaagaagtttattggaaagcaaaagtccactccgagagacagagcagcggctcagagggagatagcagctgctgccttaggaggaattcctttcatgggagctgtatgtgaatattcatgaaatactgctgaggtcggggatgcaaaggcggatctgcagttggagcttgcactcagcacctacatgctccaacacgccttgcatgtatcattaggcactcagcacctgcatgctccaacacacattgcatgtatcaggcactcagagcttacatgctccaacacgccttgcatgtatcattaggcactcagcacctacatgctccaaaacacattgcatgtgtcattaggcactcagcacctgcatgctccaacacacgttgcatgtgtcaggcactcagcacctacatgctccaacacacgttgcgcgtatcattcgcatactaggtctctgcctaggggtgtgtttttcactattaaaatgaggaaaaggtcactataacctgaatcttgaacctagctgggcaggctggacctcgaagaagtccctgccccatccacctgccccaggcaggaatctgtagctactggcttcttgggatttgtatgctgattggctggatattggggaaactacatcaggaagaggggcttttgttttctttcctgggtggtcctaggtgtcctgagcctgtagcctgcctgtctgctggtgtcctgcagggctggactgcttcccttccaaaagagtgaggtgctggcatgggaaggtgtaagggatgtggagccagccgggctccacccacggggacaagtcagtgtggcctgatctcacatatcctgcctggaaatgtgccaggcttgatttgtccagtgtactcttcacagatatctgggtgtcactagtggtgtcaccgtaggagctgtcatatgtggtgactgcccactgaacagccacatgccgagtccaggcatggagagcttctgaaacacggctctccctgtggaggtgagatgaccagaatcactgtagaagtacaaggaacgtgtgaaactgcccagtgtgtcagggctgaacctcactgcccagggggcgggggcatgcaaatattcctttcgtctttttatggccccacgtgagcctcttggttttgaatgtatgtagcatacattgacacatttgtaccatgccagggtggtgtaattttcaagggttctgcagatgagttctttaatattaaatactatgtgagtgcacatacttaaccaaagctgtcacaaagctgccatgagccgcagcgctgagcagtggacttagtttcatgctgattgaattagtgggatccgatgtcttttgtggggaggagaaggcagggcgaggtgaagtcggtgacaccctccttctcattgcactgtgcaggaaagctgtgccgacaattaatctctgtccacctgcaaactctggcaaaagtcagacaatgccagcagtctgtgggatttttctgctgaaatggctgctgcttttctgccttggcataatttcctgtgcctgggagtgatgggaaatgaggagcaccggggcttactgtttggcaccatccagacaaaatgcttagtgtgtttccttgtctgatgtggttttcatttgctaatgtgaacctattcagtcaccttcccaaggccttctgtcaaaactgaatttgatgattgcaggcggaggagaggctgagcaggaagatttctggaggttagactttgctgtcagaaacctgttgcagctacttcaatgcccctcttcctgtacatctgaatttacttaagccctgatcaaagggctgggctatgggaagcagagctcgtagcctgtggtttgcaggagaattgattcctgcctggatctgatgggaagtccagcagaggtgctctgaggcctcccacttcctgacagacctcagttggagcaggactgactgcatgttttcgggcccagaacacagtgaaaatttggagccccttgttaaaaaattactgaatttcaatatggcaacggcagagcatggagccaagcacagggcgcttctgagcgcgaggctggccctgtgcagctcggctggtgcccaggagatcctctcatctctctggagctgggtcctgaggccagctggctgagtgctggggtcctggggctagggggctgtccctgtaggggtgcagcaggagcttgtgtgcaggctgtggcactgagacatggatgggggcgcctcactgtgatgaccttgcaggtgtgcatagaggtgttcagctgtcttcctcgagtttccagaaccatgcaggtgtgcatagaggtgttcagctgtcttccttgagtttccagaaccatgcaggtatgcatagaggtgctcagctgtcttcctcgagtttccagatgccctgggggccccctcctcctctagatgttcatttgaggcattttacttagcagtggatatggggttgagaacacagtgatctggaagcaaggcaaaaaaaggagggaaaaacttaggaagagaaatggtttatagacaaaactttgaaaagtttccccaagtggtcagtacctttttgtgttcctatttcagggaaatgcatgaacttaattattctatttagtggggatttgaacagtataaagactaatttgtagattcccttgtcctttaattccacaaaagcttcatgaacatatagcaagtgccaggccctgtctaagtggtgaactaagcaatgtttcagaaagagttaggacagtttcgtcctattgaatgcattacttgggagccttagggatttgaaaaatctattaaagagaagaaggacatggagcagaagtgtggcaggggctggccaggtgtggcagaagctagggtggcctctccattgctctctctgctcccctgtcccctgcaagatgaatttgtttgcaggacagctctcctgcggcttacagaaatgggtggccttgtaaaattccaaagttcgtgccagttggatggcttaggtcacctgcccccctccaaagcccatgggaatgtgggctgcaagatggtgccacctggaaccagcccagagccagctggggtgggtaggctgagtgtcttcagcccactgtctggttgggggtctttgctagagtgggtgatgggggttcgtcttgcacaagccaggacgggagggcaaggctccatgtcctactcagctcatgctgccatactaagtaccacaaaccaggtggcttcaaccagtggtccccaacgtttttggcaccagggaccagtttcgtggaggataactattttatggacctgggttgggtgggggttggtgtctggttgaaactgttccacctcagatcatcaggcattaattagattctcataaggagcgtgcaccttggatccctcccatgcgcggttcacagtagggtttgcactcctgtgaggatctaatgctgctgatctgagaggaggcggagctcaggcggccatgctggctctccagctgcccccttcctgctgtccagcctggttcctaacaggccatgcactgccatgggtctgcagccccggggttgggtacccgcagcttaaacaacaggaggtcgtttcctcactgttctgggggctggaagtctgggatggaggtgttggcagggttgggttttcctggggcctggctctgtggcctgcagatcctgtctcctttttgtatcttcccatgattttccttctgcgtgtctgcgtcctagctccctcttcccacagggacaccagtcacctcagattggagcccaccctaaggacctcattttgccttaatcaccacttccaaggccctggctccaaatacagccacgttctgtggtactggggggtagggcttcaaaataggaatttgacggggacacaggtcagccctaacgcttcccaaggtgtccccaccccactccactgcacagtggaggcgggtggtgtcctggtcctcctcgtttccatcagatccatacagtgaagcgaacctccggtgactcaggctcagatgttctgggtgagatgggtagttagttgaattccaagtggatcaaacgtttaaaattagctcattaaacacacacccacacccacacacacccacaccagcaatgtgtgtttatctgaactttgaataggcatggagaagttcttgttgaacagaaaaaaaagtaatgaaatcagaaaggaaaagatggatctgactcaataaatattttagaaataaattttattaaaaaggtttcacattaaaaggcaaacatattgggaaaataatttctacaaataatgaggaagaacttctcacctttccatataaagatgtaatatagactggtgagaacaatgcaaattaggacagtgcccaaagtacaaaacagcaaaattacagaacagcagattcagatatttagtaaacatagacaaaacatgttacacctcactagtaaccaagggaaagtctagaaaactgtcttaccactttggtgttaccaattaagcaaagtttgtgtttgtgttaattttcttttaattggtttactcaaaactggccaagacctatgggttggatgtatatgctgcatcaagaaatgttaaactgaaattgaaaaaaaaattgacgaactatctcaagggccagagaaatggttttgcggttttactcagtgattcaagttcttgtcaagcctgaaaaaacaaaacatctgaaagtgggtgggagtgtgtgggacgcgccagggcggggcggccagtgcatggcacagcaccctggcttcctgcggagccggctgcatccacacctgttcctcctgtgcccgagcctgtgaggtcattgtgcgtgcacatgtgtactgtatgtgtttacatgcctgcatgtgtgtaatgtgtgcatgtgttgtgcatatatgtgtttgcatgggtgttgtgtgtgagactgcatgtatttgtgatgtgcacatgtgtggtgtgtatatgtatgtgcatgtgtgtgatgtgtggtgtgtgcatgtgggtggtgtgtgtgtggtgtgtgcatgtgtgtgttgtgtatgcgtgtgggatgtttgtgatgtgtgcattttgtgatgtgtgcatatgtgcggtgtgtgtgtggtgtgtgcatgtgtgtggtgtgtgtgtatatgtgtgtaatgtgtccattttgtgatgtatgcatatgtcagtgtgtgtatggtgtgtgcatgtgtgtggtgtgtgtgtatatgtgtgcgatgtgtacattttgtgatgtatgcatatgtgtggcatgatgtgagtggtgtggtgtgtgcatgtgtgtgtgcatgtgtgagtgtgtgcgcccattctgcttggtgatcatgggccctgcctgggaggcagagtgaggagccgccagcccccgggtgcacaggtggaccttccagctggtccgtattggggaccccttgcccctgcagtccccaccatcaggactgcacccccttctttgctgaggcccagctgggagtgactttctcgctagagcctggccctcctcgtgagaccctactgtggtcatctctgatggcttggccagcgttctccttcctctttgcacacgtcactccttccagctactccatgtccgaggatgtgagtggttattaattttgtgcagcgtatgatgaccccttccagaacagagctcgagctctgccccctagagcttgtgggacgggacaccaaagtgcctgcagtccctcctctccagcctgcatttcccacccatcctcggcttgctcttgcctgcccagtgcagagaagcgagcttgcctgggattgcaggggtgctcggcaggtcctctccctcgatccaagctttcctaccccctcactgcctccagggcctgggggtctcactcctgtggggttgcggtgagcccttccctatccctgccccagggtggcccccagtgccttccaaagaccgattctaatactgcagggaggaaatgcatagaacaggctggctctgctccaacgtgactgtgctatgcgggctcatcgaggcctggtcgtgtttgaaatctcatttatttcaccactctcaatcgtgcactacgtggggcctggcttagcccgagtgtctgatgagggatttgcggagtggttcagcatgcttcactgtgagtctccagccaccagcaaagggaagagcccggagacccagaagcagcagggagggttctggagctggcacctgcagccgggtggggaagtaggtgcgagcactccccgggaagcctacacagctcccttcatcttttaaaatgaagggcatctttcgctctcattttttagttcaccattgagtcgcccttggcacgctttgtttttcatctaaacaaaccctgtcgggaagccaccaggcaccaggcgtgtctcacagtgcatggaccactgcgtgagagcagcgtggatttcacgatcagacggttgcttgcagcctgcatgagatgaatgagcgctgtctgccctgggaacatcacaggggtggtcacagtgcagtgttttggggtcacttttggttttatgaaggtataattgacaaataaaaaatgtatatatttatggtatacaacatgatgattttttacatttttgttatcattttttgtttaagacatggtctcgctctgtcacccaggctggagtgcagtggtgcaatcatagcccactacagcctcaaactcatggcctctagtgatcctcccacctcagcctcctgagtagctaggactacaggtgcacaccaccatgcccagctaatttttgttttttgtagagatggggtcccatcatgttgcccaggctgctttcaaactcctgagctcaagtgatctgtgcaccttggcctcccaaagtgctgggattacaggcgtgagccacagcacccagctaacaatgtgttgattttatatacgtatgattctccagatcaagtcagttcacatctccatcacttcaccttgttaccttttgtggtgagaggtgagaacatttatggtccgttccttttacagatttcaaattaaccatacagtgttgctacccctggtctctgagctgtaccttagatccccagaaatcacccatcttagaactgaaactttgtcccctttgaccaacagctcccctctccccactcccagccccaggcaaccattgttctattctctgcttctatgagtttgacgtttttagattccacgtagaagtgagatcgtgcagtatctgtctttctgggcctggcttgttttatttagtatcgtgtcctccagtttcatccatgttgttgaaatgccaggatttcctttcttatggtggattactagtcccttgtgtgtacgtgtgtagaccacaattcatttgtctgttcgcccaccagtggacactgaggtggattccatatctcagctgttgagaagaatgtgctgcaatgaacttgggactgcagggatctttttgagatcctgacttcatttcctctggatagatgcccagaggtgggaccactggatcgtatggtagttctacctttaatgttctgaggaacctccatgctatcttccataacgctcatcccaatttatcttcccagcaacagcggaggaggaggaggaggcttcccttttctccacgtcctcaccgaggcttgttatcctcgtcgttttgacagtagccgtcctaacaagtgtgcgatgacagcgcattgtggtttgaatttgcatttccctggtgattcgtgatattgagcactttttcataaacctgttggccatttgtatatctgtgttgagaaatgtctgttcaggtcctctgctaatttttttattacattgttttcttgctattgatttgtttgcattccttatgtattttggctatcaacacctttattttaaacatgactcagcccagatgggtctaaacacgaaagcctccactcacagctggaagctccatgccagactcctcctccttgggctcaggtgcataggggctcaagggggaccggcctcatcctgaagctcatctcatttctggggctgcagtgattgaatgggttgggtggggcttgtgatctggatggggtcagtgagatgctcatggctttctggatttctgggaaagaaacgtttcctcctctgggcatgaggcaggaagatgccagaccgatgcctggtatccaaaaggagagaaactgggggacattgagcttccagtgagtgtggagctcagagcaaagagaaagctagccctggggacaggtgggtgccctgataaaaaagaccagaagccagccagcctcagacagattttcagctgtgaaagcccatcagcccggcttcggtgtagccaggtttctgtctccagctgcagaaagaaaaaggacgtgagaattgaatgatgccaagaaactcgcagaaccaggcaggaggatgtcggggagaaacgaggagtgtgctggacctgttcgtcatgaggctccctctctgtctcgtgacaaattgacaaataaaagttgtatatatttatggtatacaacatgatgattttttacgttttcattatcattttttgtttaagacatggtcttgctctgtcacccatgctggagtgcagtggtgcgatcatagctcactacagcctcaaactcatggtctcaagcaatctttccacataagcctcctgagtagctaggactacaggtgtacaccaccatgtccagctaattttttgttttttgtattttttgtagagatggggtcccaccatgttgcccaggctactttcaaactcctgagctcaagtgatctgcccctgggtggaggacttccaagggaacaggcgatttccacagggccctggaagctgggtttctgatgcaggcactgaggggctctccagggggaggaaggatttggcagcttccctttgaagacaggactcagttttcctaattcacgtcctcctcttcctcctgggtgctgttggcaagttcctttgggttaggatggggcaggtttcagggcagtctatgaaacaagaaatggaagtttacttcccaaacagaagggcaattttggatagacttcttgacagatctgcatttttcaaaatccaatccatcggaagaagttaggacaaggaaaatctaattttctggaacatcggagatggaaaaggcactgcggcccgcagatagagaccgccgcgctgacctaagtcgataagttgaaggctctaacaagtttgaaaaagtccacttggccccctaaatcaagttcaggcggcagaacaaatgtgttgttccaacagagacggaacaaacctttggctgggaggaagaataaagtcatcagctccctcttatcaggtttctgtctctctcccttcccatctgccatctgctgcatcctcgaagcagggatcgctttgcttgttaaagggaaagtggttgcttttcagcgcaattaatttagtaggccacaaatgttgctgactgatgggtggaaggtttgatcaaacagattggttaattggtagtgaagaaatgctggccatgtgaaaaaggatgaaagtgaagttggactttgctgtcgttagagccgccgcctctgcttttcgggtgaggggagtttctctttctgagtcatcgttgcccagagctggggcctggccaccctttttgttttagccatttgtacagcatgatagtcacagccgagaagcagggctgggtggggaggcgcctggacgtgggtcctccagcctccctcaggtgcgtgcagcctctgtacctgaacgtctggcagcagcctttaaagacgtgccttgcagtggagtgataagtcttgcacgtaacctgctatttctttttttttttttagtttatttatatacttattatttttattactatttagaaatctgaataccatgttcaaatatatttcctggccaggtgcggtggctcatgcctgtgatcccggcactttgggaggccgaggtgggtggatcacgaggtgaggagatcaagaccatcctggctaacacggtgaaaccccgtctctactaaaaatacaacaaattagccagctgtggtggcgagcgcccgcagtcctggcagtgacttgatcttggctcactgcaagctccgcctcccggtttcacgccattctcctgcctcagcctcccgaataacctgctatttctaacatgggataaattaaggcgcctttgccactgagtctccaggtgcctgcactgtaaattctatcaaatctgtttgcattgaagtgtttattagcagcccccaccctcgtgacctgattggatggggaggtctgtggcccattgcatctcccagctcacgtgcctgccaaagcctgcattcaccattgctccagaccaggtttcctgacgccacaggcatggggggctggatgagtctgtggtggggcgtcctgtgcactgtatggtgttgagcagactcccaggctggcacccactggaggctggtagcacccctcccctaggtgccacaaccaaaaatgcctctagatgttgcccagtgtcccctgggagcagggaccccctttccaccatgcccgagacccccacggttctagacaaagggcacttctgggaagcgttttttccgtgtgaatttgtgggtgtccagccagccagcaagggtgaatttgcacgagtttcctcaagggacatgtcagagtggggtaaaagtagagttaatgccccatggcatttagggaaaaacagaatgatccagccattgcaactgtgaagtgttgtgcacacttattggaggaaaacgccaactgtgtttgttcttagcaaacctaaatgggtagaggttaagagacccagagagactaaagggctggagggtggtttcctgctctccgtcccggctggagggacacttttcacctgaaacctggaggtgggacccatgcgcccccaccctgtgctgttgtggtggcaggatgtgtgaaaggggaactcaccatcctaatagatgttaaactgcccggctcctgtttagacagcagtttgctttgcgttgacgactctcccgtatgttcctctccatctggagtgaagtttcccaacagccccggctttgcagaagacaccagcctgggattcacagtgctcagctgaccagcagtgagtgccagcggatgcagccttgggttttgtttgatcctgtccaagatttactgctttgaatgattcaaaaacctaagcgtgtgacaatgatttgaactgacgttctttttttttctcctttaccccttgcctcatctcttaggattaactgggactctcctaagaaaaccttatccatttggttttattattagatcatgaatcgggtagggattgctggaggctatgatgtgggcatgcgctctagaagggcaccatggtccagaaggcctggttcgtgcccaggaggagcctggaatcagtgatactcagtcagaatacatgctcaatgcatagccactgatgaggaaattagaagctcagtgaggtcaagaagcgtgttgagctctttggctttatgttattaattactaccacttgtttggcacagagagagtaatccctggatatgcactgattgagttgaagtggtgacttgccccttttcccatgtaatgtttcttttcattcgtttattcacaaatgcccagtcaccctctctgtgcctgccactgcacagatgccggtggtagagagctgggcagagacccctccttgcccgcaatgatgctgccatcggcctgagccatggtggggcaccacacactgatatggagatgctgcacaccatgcatgtcacatgatgccgtgataaacagatgacttagtttccacgatcttaacaggtgacagcactgagcgcttgccctgtagctgccaaagacgctcacctcatggtccttagctcagccctctctgtagtattacaataagcataataatataacatataaaaatataacatataacatgttataataaatattataatatataataatacaataagcaggtgcattattatccccattttacaggtggggaaactgaggctcaggaaggtgacgtgtgtagggccaaaaggacacactgggattgctaacatttcccaggtcagagaattcatcgattaaaaattccctgttatgctccaccgggaagcagggctagatcgcactgttaagagtgcatcacatgtgcagcctcattcatccgtccaccttgtgggctcatcaaggcttccgtatcttggctttgctgaataatgctgcaatgagcacgggcatgcggaggtctctttgagatctgatttcagttcttttggataaatacccagaagtgggattgctggatcatatggtaggtggttgcctggggctggggcaggggaaatgggaagtcactattcaagggatataaagtttcaattatacaagatgaataagttctggctgggcacagtggcgcatgcctgtaatcccagcactttgggaggtggaggtggatggatcacttgagcccaggagttcaagaccaccctggccaaaacatggtaaaacaccatctcaattaaaaaaaaaaaaaacaaaattaaccaggcgtggtgtcaggcacctgtagtccttagctactcaggaggttgaggcgggagaatcacttgaacctgggaggcgaaggatgcagtaagccgagattatgccactgcactccagcctgggtgacagagtaagactccatctaaaaaaaaaaaaaaatggtgaatagattctgaagatccactgcagaacatccagccaatggtattttgttgagcacttgaaatttgttgaggatagatctcatgttaaatgttcttcccacaataatttttgcaaaattgctcgtatttttgcagcatctcccaggtgggactgttccctctctgcatttatttgggcctcggtgttgctgatgttgcagggcctatggatttccagaagagcctgagggtctcttcccaaggcgtcttatgcatgctgactgtgtcttctccctgcgttccttgtttcagtttttgtcacgattgttcatttgctcattcaaccagcatctttgagcatctgccgtgggtcagacccagtgctaggcacagggtgtcatttttctagtccctgggggctcacagcctggtgggcaagaggagcaccaaccacaaaaccatgcaggtgtgggtgagactggagtgtcggtggggttgggttggcctccacagggagcggtgacctggtggtctcagccactaccatgaaatgttttacttcagccagagggtctcaactgggacagttctgcccccagagagcacttggcaatatctggagacattgatgtttgtgagtgggggatgggggtgctatttgcatctgggaggtgggagcaggggtgctgccaagtgccctacccagggctgcctcccagcagagaacccttcagccccaggtgtcagcactgctgaggtcgaggaagcctggctttagtgagacctgaagatgaacaggagccaagcagatgaagaggcaggaaaggggcctgggcaaagggagcagcgtgcgcagaggtcctgtgctgggagggagtgtggggacacggccaggtggctggaggggtgggcagggctgtggcgtgaagacagtatgtgggcagggcggggtgcacaggctccaggcctaggcgggagccaggggagctcctcttcctgcccctgctgtggggaagtgtcccaggtctctcctccaggctggctctgtccagctgctctagccttttaaacccccgggtccttccccagggtcccctgacaccgtgggtcctcggtggggtggcattgacctacctagtcccgcctgtggtcagccacaccgcacatttccacctcgagagcgcatgcgagagagaggaagagagagaaggctctgtgggtctcattagtcgttgattgaggtcagagagctctggcgtttatttaactctgcaaattagaacagttaatttcctgggaaatgaatagagtcttctcattgatctagggaagagcgggtttcaccttaggagggcagagggaggaggcgaggcaggttctgctaattccagaggcggggttactcttaacaaaaaacggcttgattatctttgcttttttgctggaaatttttttttaatttttgatgtcttaaaaaatatagccttggaatgctaatgttgttaagttttccttaaaacatttcacattgtgtgtgtgtgtgagagagaatataaggatttttttccacgggtcagtgtgtttggaagacaccacgtggcctcatctcccttgggtacttgggtacctgatgtatgtgctgacaccttccatgtagacgtgcggtgagcggaggacttccggcttcgtcaaattcagccgttgccactatttgatggcagagccgcctccctggagtagcctgcagaattggtgcttctcagcacaggcctgggagatgctgcgtgccacgcatgtcacatgatgccgtgatcaacagatgacttagtttccatgatgttaacaggtgacagcactgagcccttgtccaatagctgccaaagacgctcacctcatgttccttagctcagtcctctctgcagtcttacaataagcataacaatataacatataagaataatatattgtagcatatattataataataaatattatataataatataacaaggagctgcattattatccccattttacaggtggggaaactgaggctcaggaaggtgacattgaacatgaaaccccatgcttgaggttacgtggttggtcagaggtccccccaggatacgaaccccaggattcgggtccagcagttcttccgggtccttgtacttgcttcggggatggttatttattcattcagtgcaatggggttggtgccgtctgtgtgctttgcactctgctggcctgtggttgggagctaacgttcctcatttgactaactaccccccatcccctccaactccccacatacacaggagaggggaggctgctaattctgcacctgaggcttcgcctggctctgtgggtgcaccaggctcagtctctcccgcagcagctgggaggtgccggcatcaggatccgcagcccacacctgcagctgaactgagcggagacctggctcctgcagtatctgagccgcctcccctttccttcccagactggcatgaagggagaaagaagtcaagattctctgtctccctttacagcccaggatgagtcccttccttggtgcctgaatcccctcctgggtcctggtgtgtgcagtggctgtcactgcagcattcgggatcctggggtgtgctgaggcagcaggaagctgtgcccagagcagcttttgtcccagagccctttccaggcaaggctgtttgccagccacacaatatgttcacttcatccaacgctgagacgcagccaccgaggggtagcatcctggaaggaacagatagatggcagggagcggaacactcacaactggagaggaaagtgacagactggggtgggggcccctggttcagttcccagtggacttgtgcagaggcctttgatcgcagcagtgcatttcttcaagagtgtattggatgctcttcacacaacaggctctatccctggtgtccccttttatgtcccaggctgtcaggaggtcttgttatcttttacagataggaacactgagctctagaacattcaaggatcctccctgtcatttcacaggtgcagagttgagacttccagccagcatccaagggcctgagcttatctgcccaggacgcactgccggatatacccctcgcctctccaaatttgagtattaggaatgacggtggcaagaggatagcaaggaggcatgaggattcccttgcggcacggggtcttctgagagtcagctggctttccctaggggagtgtgcacctagaggacttctcttcgttaggagtgattgccactagctgcagggcagcccagtgtcccgagtgggtggcaggtcagcccctgtcccctcgtcttggcctctgcatgaactcatcacacatttgttcatcagcctgccaggaggggatgtttgggaaagtcttcatcgagtgagtgcttcacctccaccaggcattcatggctcacgtgcagcctgattggaaagttctattcagttggctgaatccatgcacaggaagaaacaatacaccaaacacaaaataatgtgtgatgcctataattctttggccacctgacgtcggagccagtgacattcagcttctgccaccattctgtcatgttacgcgggcctgcaacccctccccacccctgctccctgacggtgataatttaccaagactggcgtcttcgtgggtgttttagtcaccagttcggcaatcagagcacattctggatgcttgggtttctaggttggggccacagggactgtggctatgcaggaacactgaagggggctctccctggagaggaggggcctctcatcttgccgtcacctttagtacatgcaaaatgggtttgttttagctcttgagagcatttcaaagaggcttgttgcaattaatgcctccctgttggggaaattgagattgtatgatcctaagagtggaaggacggagatgataattgtgacttacccagagacaaggcctttgaacctgaagttacgggaaaatattagctctggtgccagcacatttgaggggagatcgcaaagatggtttccaacaagatagaacttgacacagcagttatgccatttacttttgtataaaaatccaattgtctgtccttactggctgccaagggtgtgggagtgtgtgcgatactgagtagggacccagatcgtccaaatgtggtcctggcctttgggtatgaagtgtgtgcctggctgtggagacagatttgcagagggccagggatgctgggcctgagcaggggcttctgtatgtggtacagtccaggaagccctcctggaggaatttgaatattaaattgaaactgattgcattagtgtcctggggctgccacaacaaattttcccaaactgggggggcttaaaacaacagatctctttttctctttcagttctgggggccagaactctgatgtcaaagtgtcagagagccatgctccctccggtagttctaggggaggacccttcctgactttggccagctcctggtggctgctggcagaccttggctgtgggctcagatgctccagtatctgcctggctcatcacgtggcctcttcctggtgtgtctgagtctcttctgtgtccacatttccctcttcttgtaaggacagcagtcatggggttaggactcaccttagtctggtatgaactcatctaatttgtacccaataagggcaccttctgagtttccagaggaatgtgacttttgcaagcatgctgctcaacccagtacaccaatccacaatgaatatgaaagaggagcagtggaggagattctagcgcccaggaagagttgccctaagtcatcttcaaggcacttcggctgtgtgtccatctgcacacctccccatttatagagggtgtggcaggcacttgacccaggagagctttgggacatggaactcgctgggaggccatcaaataaggagatgcaagaacaatttccgagaccacatcgagcctgtttcttaagcttgcaggaagcactcacagccatgcctgcaggggtcctggctcctaccccttgcagctgggggatgctgggcgagtcccgtaacctgccagtgcctcatgtccagagccaccagaggccctttccccatggggctatgtggatgtgagacaagatggaacacatcatgtacatctcacggtgcctgacgcacagccagccatctggaaagagtggacggcatttttgcaacatccttcggtgggtcataagtaagtggtcactggaaaaaaaaaaaaaagtcttggcttttaaagtctttcatgtagaaaatctcttgaagaggttcagaggaagctggcatccctgaattttgtttcacgtggccgtaaggcaaatccaaaggtatctttctctttctggagtgaagttgctattttaaattctgttaatgtccccttacctgtagatagtagggccttgaaatttctcatttttttttctgataaagggcaaaaagagaagtaaagactgcatttcttgagagatgtcagaacgggaggggtgtgttttggggaagagaggaaattcaggcagtaagtggccttttcatcaggtgggggtctgtggggcagggggttagatgtgcaggggacagcatttgagttcttggagagattatgaagccaggagcactggcccagggtggtgcgacttgggggggccacagcaaagcgggccccgacaggaagggttgaaaatgccactcaatgtgcaagagtgtttataggtttaattttaaaaaaagaaaaaaaagcagcgctgtctgtaaagagttccatggccatcagctttggagggctgcctccaacaaagctaacaggctttactagaaaatttcttgaaaacccaacaccatgtgtgcttcttgccacgggtgccgacgcaagtgggttgcctcttttcccaccagagcccgtctggttggcctggtcagtgccgtgccattcccagcttctcgctctccctgatggtggcggtaccggttcaaacccatcaggaagtgaggagctgcctgtcctaatatacccgtgatagtagtgggagtggaactcactgtaactacattttcccttctgtttgttttcagacactaactttaagggacaaatagagtggaggatggagtaaggtggcaggtccaagtttttctcatggaatcttggctcaggcagggatggatatgccaccgtttgcatacttctccaccgcactgccttgttttaggaagggcttagcccaaagtttagctcatactaggttttgtgaacatattcaacaaataaaggattgagtgacctgtttgaaacctgttggtttgctgattaaaaaataagcataagaggaaaattgctgagaaaaaaatgttattttatgaaatacacaacactctttccaatatgttgtgtggcttcagaatcttctggaaatcctccgatagtctagccagaggaggatatgacattttagtcaatcaatggtgcaagcatcaccctgaatctgtcacagcatatgaagtagataaccagttaaaaaatattcagtaaaagaaaatcaaactagccttaaaattacactgtatggaattccattcttccttgatccagaaggcacacaggtattctggaagacactgggggtcatgggagagcctatgtggctgcatgtggggtttgcaaatgtgctgactgagtgtcgggtggtgaaattccacaggacacagcctctcccacaccaggtcacatcaattggtatcaaaaatgaggtttttttttcatttccttggaggaaaaatgtatttgattttaggtggatagaaggcactggtaaatgcaagatgtgttacttcttacgacttctcatctcagtaatcctcagactcagcaagagccagctgtgaggtgtagtaagatacatgaaataactattttcagtactgccttcctatatgtcatctacaaacaacctgcttgtcaggtgcatttttactggctagaagtttcaagatttacctccaccaggcaagattaccccttactcttcatcctggtctctctgagccattctgcagcaaaggagagggaagaggtagccctgggatcctgtgagcattgtgtgaagtggtctactggaagcaaatgatggctttgaaatctcatcttttatctaaaaaaatgtatccacccagaagccataaaagaaaaggcagatatgtgtggctatataaaaattgaagttcttcactgtcaaaacacacaatttcatttttatagaaataaatagaaacctgagcaaaactttttaaatatatttgacaattttccttgataaataaagagctctttgaaatcaataagataaacacccacaactcaatttggtggaggttggggatgttgaagaaagagaggctaaattctgtgaaccagtggagaatggactttaggtgattgagaaacagttttaaaagatactcacatttactacatgcagaataaaactctgatctcctgtttgaccagtcagattggcaaagattagaaagttctgatctcctgtttgacctgtcagattggcgaagattagaaagtgggtgctcagggctgggaggctgtagggaaatcgattctcgtgcagggagttggtggagtacaaattgcacattttggatggtcctttgacagcatccaccaagatgtaacatggacacaccctttgacccaataattccacttctgggaatttattctatagatgtacccacaggtgtgcaggggtcttcactgcagggctatttataataggaaactgaagattacacacatctctagcagctgaggactgtctcacctcactccagagcatccacagaacaggacaccagacggcttgcgtaaaggatcaggtgtagttttatgaatggccatggaaatttggtcaataacggatcttaacgtgaacaaagcaaattcacaggacaatactgatgcttttgtgggagatggactgtatgtttgatgatatttgtgcttatatgtgtttgtacaacatttttagaaagatatttgttaaatgtacagtttagctagggagcaggttagaggatgcagggggacaaagaggtctttatttatgtgaattagatagagtggactcaaattactctctaataaaattgctattttttaaaatttttttgagatgaagtctcgctctgtcacccaggctggagtgcagtggtgcaatctcggctcactgcaacctccacctcctgggttcaagcgattctcctgcctcagcctcccgagtagctaggactgcaggtgcatgccaccatgcctggctaattttttgtatttttagtagagatggggtttcactgtgttagccaggatggtctcaatctcctgaccttgtgatccacccgccttgacctcccaaagtgctgggattacaggcgtgagccaccgcgcccggcccaaaattgctgtttttaaaaatagttttgccaggtgcagtggctcacacctgtaatctcatcactttgggaggccaacacaagaggattgcttgagcccaggagttcaagaccagtctgggcaacatggccaaaccccatctttactaaaaataaaaaaagactagctgggcatggtgtcatgtacctgtgttcccagctacttgggaggctgaggcaggaggattgcttgaacccaggaggttgaggctgcagtgagccctcattgtgccaccgcactccagcctgaagtgacagagggagactgtctcaaaaataaataaattagttaattaaataaataaaaaatagtttgctcaaggaggaccttggcctttcctattagctctgaatgatgaaaactcccattgtacagatgctccttaatttacagcccaataaacccattgcaagttgaaaagatagctagttgaaaatgcacttaatacacctcacatgctgagcatcatggcttagcctagcctcccttaaccgtgctcggaacacttgcaggatcatcaaacacaaagccgatttgatagtaacatgttgagtgtcttgtgcaatttattgaacgctgcactgaaagtgggaaacagacggctgtgtgggtgccgaggatggtttgtactgaacgtgtatcatttttgtaccatcataaagtcaaaaaattgtagttcagctgtcatttaagttggagactgtctgtacttgacagttgatatgaaatattcacatacgttctgcactggaatccactctgctccagtgtttaagcccagtgtgctgcggtggattgcagcatgcgtggagggcacccaggtcctcatggttccctcgtgggtctgggacgcgggtcgaggtggctttaagcccagtgtgctgcagtggattgcagcgtgcgtggagggcacccaggtcctcatggtcccccgtgggtctgggatgtgggttgaggtggctgtgagtggctcttctgcccttggcttctgtattttataataagagagggctcttgctctctctctctctctcctgctttgtactttcaatcaatctctttccagcatagttccccctaaaacatcagaaagctgagtgagcctgtgctctcctctcagagcttagccacttggattccgcagaccctggattgtcactttaaaaaaaaaattaatttaatgtaattttaagttccaggatacatgtgtaggacatgcaagtttgttacataggcaagcatgtgccgtggtggtttgctgcacctatcacccatcccctaggtattatgccctacgtgcattagctatttatcctgatgttctccctcccccccaccccatcccccgacaggccccagtgtatgttgttcccctccctgtgagtcattattcagcactcacttataagtgagtacatgcagtgtttggttttctgttcctgtgttagttttctgaggataatggcttctggctccatccatgtccctgcaaaggacatgatcttgttcctttttatggctgcatagtattccatggtgtatatgtaccacattttctttatccagtctatcattgatgggcatttctgttgattccatgtctttgctattgtgaatagggctgcaatgaacatacgcgtgcatgtatctttataatagaatgatttatattcctttgggtatataccatttaatgggattgctgggtcaaatggttctagatctttctggttctagatctttgaggaatctggttctagatctttgaggaatcatcacactgtcttccacaatggttggactaatttacacgcccaccaacagtgtaaaagtgtacctgattctccacagcctcaccagcatccactgttgtttgactctaataatcgccattctgactggcatgagatggtatctcattgtggttttgatttgcatttctctaatgatcagtgatgttgagcttaggttgtcccttgtgatggtttgattgtcaccagagcagcctgtgctttggttgaataagattcaagtcgttgtaggcagttgccttcaagaaaagtatccgcatgtcctgacggggaacgcctgccttctgggcagtgcacctggtgcctgcggctggctgggcaccgacatgctacagcaggatggccctcattcccacgaacggggtcagaacacggctgccaccttgggaattcgcttttctcacgtgagattaagtactgaaagtgactttcgtataagagcattatcaaagttgcacggctctttgcaaaattctctcatcccttccaatcgctgcctggtttcctgctctgtggttgggctgtacttgcttagaatattcccaaatgataaagattgagttgtttccagtttcctatcataaaatcctcctcccctgagttcccctgcacacctgggagagggtctgtgaaacaagttcctagaagtggaatttctgggtcagttataaggtggccattttggtggatgtcatcgaatgatcattcgagattctgcaatttcactcccactaacacctgtgcgagggtgcatttccacagccaccccacgtgtgggaggatctctgccagggctgcagcagggaaggctgtcttggggctcggcgtctctgtccccatctccttccatgcccagtgcccaggagcctgccatggccacagctgcaccatctccatagccaccctctaaagctcccaccctgggatgaggccctccctcagcctgttctcactgccctctggtcccctgagtcctccccatggtggtcaggaggagactgtgaaaagcatgagtccgaccatgtcactgccctgttcatgcttgcttagcctctgtgtccagtcccttcgccggcacccagagccaactcccactggctggcctggccatctcctcactgtgtctgtgcatcagccacactgtcctttctgttcctcacacttgtccagcatgtcccccaccagagctgtcctctgatctgcccacagctgacatacaggtctcagctcaaaccccacctcctgcctgaccacctgccccaggcccacctcctgccccggccacctgccccaggcccacctcctgccccagacccacctcccgccccagccacctgccccaggctcacctcctgccccggccacctgccccagagccacctcctgccccgaccacctgacagaaatgagatgcgaggcactgtccccaggtcccctgtgttagttacagcactcagcctgcctgcagcagtcttgagcagttctcatctgctggctttctgtctcttcccctggaccgcaagcccttgccgccgtccttggtgctgaacggtgcctggcacacagtaggcgtgtaaaaagcgtgtgttgagggcatgagtaaactcttccaagggaggtcgcctgtgcgccccacagggaagggagctgtgcctctgcccccttctctgccatggttcttcagtgcccagagcagggccaggcacaggtgggctctggaaaggtatctctgagtggacagaggctggctcctggctgagaacacagacactcgacagcgatgcccggcttcccagagaagaggagggtccttctcagtcacaccccctctgccagcctgcccgtggccctcactcctccaggagacaggctttggacgtccatcaggaaggagctagcaaatgtcagtctctcatcagggtgggcggagcggtgacgggtttccttctgggtgtcaaggtctctgtggctatggattcagagctggccaagccaggctgtttccctagagagtccgggaaacccatgatgctggcccactgcacagcgtccccagcctcagggctgctgcctcccatgccctcaacagtgcaaggattcgtgtgatcccagaaggcccacaggaggacctctctcagaagagggcttaggtctccttctggtttctgatctacggtagggggattcttggtgcatccccttggctgccactgccgcctctgtgcctttcctgccccaccctgggcagcaggcactagggccaggtgcagtcagttacctccagttaacttcaccctgcagtgggggtaattgaaggttctgcgaaggcccttggctagtttagagacttctggctggctgccctcctccctgggggtgtgagcatttttgtttcttctctttgctctcctgctttgggtcttgcaggaagttattcgcttcctggtgggtgttactgtccctgccccggctgtggcgccagtccttcctctggcctcaccctgtgttttctgatggtccaggctatttcgggagaaggctgtggtcacagtgctcatcaccctggctttctgctcagcccctgcggaggctgacgcgcccttgccctcacaggccccgagagcctcttacagcattatcctaaaacaaagcttcagcctttcttccccaccgctgggcaaagtctttatttttggaccaaactaaacacttatttgtttgtaaagggtggcgctttttggcttctaagaaacttacctggggttggtggcagacttccttggccttttgagagcagggaactatttttagaggcattgtggcaactctaataaagaaaagaaacaaaggtaggtgtgacaactgcttgtaatcacacacacgtatacacgtgcagacacgcatgcacacatatgcacaggcacatgcacacacacatgtacacacacacacacacacacacatgcacacacacctgcatgggggagctggcaagtttctctttttctggacatttggcaaaatctgagtcatagaaacctcaattcagacattgcaggggtgcgggttgtcaatgtggctcctgaagctctggcttaatgagaccccaacaggcattctttcactacaaaggtcaccagataatccagccaagggggacccagcacagagctctcacctggttccaggaggggtgactgcagtggcaggtgcagccctaagaagtgcagttgtacagggagctaccctgtagttggtgtgtgtggctgaccctctcctcccagagccacctgcaaggacagtcagagcccttaccccgggccacacgtggcccacagagctgccttccctttaccaaaggctgcacaggcctctgcggtatccctgggttgcgctttcaggcgaagagcatcgtgatgtggtttactgcccttgtatcagagtggctcaaaattaacccctgggctgtctgggagacctgctttggaaacacactccacatggctctggtgccaccgttagcacatggcacatctgtgtcctgccagggcctggcaatggctgcatacaggctgcagaccaggggcaccatgaggtgactgggtgggagggggcctcctggtcggtgagggcgggagagacaatgggtaggtaagtcttgactcttcacaggctgagaagggtagcccctgtccatcctgggaggtgtcccctcttctccagctttggagggtgtcctggcctgtgcagctctggtcaccccaagagggcctggaattggagccactgaccacagtaagcctctgggccaccccctctgagggcctccctgagccattctgtaaccccccaagtctgcttcctattgcaactcttgaaacagtgtctctgtcattataaaacctcatctgacctgaaatgaggctcatggagtacttcctatttttgtggtgtctcacataatcacaggtaagtctcacagacctgtgagctggttttccttgttttccaggtgaggatcaggctcagagaggttaaaccgtcactgaggtcacacagcagtgggtggtgcagtgcgtctggtctcttctagtctgttggggctgctataacaaaccgcctgagaccggctaatggataaacaaacagcagaaatcaatgcttacagctctggaggccgggggggctgggatcaaggcaccagcagttcggcatctgttcggcctctttctctgcttccctgaccgtgcctgttgctgcatcttcaagcctctgataagtgcactaatcccattattagggcagaggacccaacccctcccaaaggtcccgcctctttgtgccaccacgctggggctgggtttcaacatatggatttgggggtgggggacatgagcacccacacctctgcagggcctccgtctgtagccctcgcctcctggggtggaagctcatgtcctttgctcagtctgtgagggtcattggcattcagcttttggaacctcaggcttcctcctgtgcacgatggtgctggatgtgctgagaaactccactttgcctccttcatttgcttatgagttttctgcaggaaaccttgagaccttccttttcccaggctgctgagccccaggctccagcctgtcctccaaagacttctcagtaagaggcattctgcctcttaataagcatgatgacagcgatgatgcggctgaggagccaatgagatacaagacatccagcgagtctctctaacgtggtttcgtgttgttcagcatgagccactttacagagttggcaagaggaggtctcgcggccattgacaaatgtcaatatattgatattgatgccttccttcttggcccagccgatctgggatgaatgtgcaggggccaagccagcagtcgtccctgtgttcaacataacaggtaaagctgccgtgtatttggtccaacggagatcgaaggtcattatattcatgttgttcaaaaacttaggaataagccacaggtaaagtatttaaagattacaggcaaagggatgtgacatttaaaatattcagttgcactgtgtgtgatgcacagatgtgattattggcaccatgaataagtcgcatctggcttgggttcctgctagccagttactcagtggggccttccagggcaaggtggtctcaccactgagagggagccccagtgggaccctaattgcaccagcagttgttcctaataagagaactaacacatttctctgaatctccatgactcattcagatttccgtcaagaaaattcaaactgaggtgggatcaataagtcgtgcaaattgtcagaaaactccctccatggagggcatctgagttcacctttagagaaggagagcataatgcgccccacctgaacacttccctggctcgggtgccgaaggctcagggtgtggttcataggcagctatttgtgtaaaggggctagcatctgcatcctgtcttggctattgaagttgtttaaagggtgactttggtaagagctggttctacccactgatgactgtttctgcttctctgatccaatcagaatcatccaggttgacgcaaggatcttttggtaccttgcccttatttatgtggttttttaatgatgaaagtagaaacgcggcccacatcatgatcacctcttaaacaactggccagtgtgagagaatctcaaggttttttgtcattatccagcttgttttcgatactgtgggggagaaggtgcagatatgatcaccaggagatgcattctcatcagctctcccgcctgggaactttccccttcttagagtgccttctctccattcctgcctgtttaaatcctacagggcccaaacagacccacttggctgctatgagaccatgggtgaatcacagttcactcaataagccttttttttcttatctatacagtggggatattttgaaggttaaatgagtgatgtgtataaaatatgcactgtgactaacacatagaagtgccttttcctcttcttcctcctcgaccatcaacattatcattaaacatgagtgtttcactgattcttccctgattcctcctccaccacaaccaccaccaccaccacgaccatgctttccctgtggtgacctgttttctcatggcacctgttcctcagcacaatacctattccttcttcaagcccctttttgtctcctacctggaaggcatttttgtgggcctccttcagcctcccttgatcaatgccaagcctgtgtgcagagcaggtccttgctaagtatttggtggaaggaagccagggccttctatagccagcctgtaggatgaaacttctttttgacccaaaaatgggggagattgtcaatgtagattctcacttcagagggtcgattgcccaattcattgagaatcagttgaaggtaagagtccctgagtcctggctcctgtttgtctgacctgctttccctgctggactttacaaggaaggactgagacgtgttccttcctatctctcttctcttgaaacaatacctgcccagtagaagcacatcccagtctctctcaggggaaagcaatgactggggagtgaagacaggtggtctgggtgggtgggcagattctggctatcaggcagaggtctgtaaccttggaatgacatgcctcttctctgtgtcatagctccctctcactgtgaggttcacagcaagggctggagacaggcctgggttggaatcctgactcaactgttcttagctgtgatgttcctgaacaagctgctttccctctctgagtgactgatccttcgccataaagtggggatgctctaggcagccacatcccatggatacctgagaacttagtgagttatcatcttccatgtggctggcagagtgcattgttaggcaatggtggtggtgaagatgatggtgatggtgatggtggtgatatgataataacactaatggtgatgataatgatggtgataataatgatggtgatgataatgatggtgatgataacaatggtgatgatgatgatggagatcataatgataatgataataaaactgatggagatcacgctactgctgctgctgatgatgctgataacaatggatgatgaggagaagaaagagggtgatgatgataatgttgacaatgacaatgataaaaacggatgatgatgaaagggaagatgagggaaagcatggtcgtggtggtggtgatggtgtatagatacttcctgggtctaatcctcaggtttcttcagtatttccttaaagagttttgcatgtgtccatttccaaagcctctccctgtgagtgcatcaacctcatattttcacaccatgctgaattgtcatccctgcttgggaagcttgacattccattccatgaccttcataatctgtaagatttctatttctttgagctgtggtttctcctttagtatgtgtgctttattctactttctaaacctgtgcccgcaccaatcatttgccctgctgtgaagatagaaatggagcttccttctttcctctggtaattctgagatgtgtgagtttctgccctggggtttttagttttctcaaactgcagggggttaattagtttggttatttcacaatagcatttacagttttcttattaactgggaagatatccaaggactcctactcttcattggggtcttttgcaatgttttagtcacaaggatgggtggtaggacttgcagagaatccagtaataaggagagatcagagtcattgaaatcacctctagctatcctcaaaaagtcacggggctcagtttgtctttttggtttgaccaaggaaagaaatattagacaatgcatagcttcattgttcaactattcattttctacagattttgcttaaaaacacttaaaaagcacaagttatcaaggtactttaacttgggagattgggaaaaaattgaagagaaaaaaaaatcagggtatcaggatcttaaagccagcagaggtttttcctgcacctaaaaatctcaaaagggaacattctttcttggcaacaattgagtagttgtacataagatttgaccaggaatggaagtggaagagccaaagacgttgttttctcaccgtgaagactcgttctccagaagaatgggaatcggcgaatgaggccccgtctggacttggggacttgtctcttgctgcttctcctgcctagatatttgctccctccccaatctgcctggtcctctgacctggatttaactttaatttgttcatggagtcttccctgaccctccagactaagttgctccctgactgaccattactgtttatttgtaataataataccaagcacttgcccaatgcagagatttaaattagaattaaaaagagactttttaattatacttaatagttccccagaaagtgtttatttttaaaaatgttgaactatcctcagggcgaagataatattgtaaggctgagaatcttagagaaagttccatcattcattttatgtgtgtgtttctgctgtttctgaagcaaacacctagagatgctcttgaacatgcctccaaagagattacctgggaaatttattgcagtattcttcatcatggcaaaaacaaacaaaaagaaaccaaaatgtccaatgataggagaataaatatgtaaattgtgatatattcaagcactacaattctgtagtaagccacacatacacacgcacacaccccccatatattcatgttctcatggatgaatctctaacatattagtatgtaaaaattgcagaattattttgacaaaatggtattgtttatatgatgtttaaaaacatccccaaacactatattttatttttgtgttcatatggaatgaaagcatgaacatgaacagagaggacacatagaccaatttccaaatcatggttcccactgtggaggaagggactgggatggaagacaatgagcaaacaggtcttccactgatggtgatgatgatgatggtataatggtgatacttcgactagaatgtgtgacacttcctggagatctgaagcaaagatgatgaatgttctcacctgctaaatttaggtggagtgtgtgtgcgccttgcacatgtgcgtgcatgtgtgtgtgtgatcatttttgggacattcctgtgtgtttgaaatatttcatagttaaataaacagtgttggtcttgtgatgggcttgatgaagagatcgtacatacttttttttacatcagactctctcataatagatggaattattgagtccagataaaaatcagggtcatgcagaaagctgtgagagtgattaagggactttgtggtaggttatgaatgaaattgtgacgtgggcttcctgcctgctctttgcctttctccagacctgtgccatggacacctagatatttcctcatgctcagttccctgcaggcatcgctggggattggaagtcttagagggatccattatctgatggagaatttgagaggactcttccacgtgctggatcagagcaactattcagtgtgccctatagagcaactgacttagaatgttcgaagggaacagtcctctgaattagtcccacctctaaagagttatttaaatgctatctcattacctctgagttccttttatgaataaaaagggtattactgagtttaagatgatgagttaattaatgaagtataattcccagaaagcctctttgacataattttaaaacccagataggtataatcccatcatttaaaactttgaatgggagactggaaaataatattctgattgaaggatatagtaaccccaacaaggggactggagtgaagggaaggggagctagcaagggagagaaaatcaggcattgggagaaccaacaggtgacgaggaatgagactcaacctgaccctgagtcacagtgtacagtggagggcaccagggagatggtgttaggtgaacatatggatgagttgccaacagccagagcctctgacagggagccagctgccagcctgccgctgtccagcacataatgcagcctccatcgtgggtgaataaaccaagtccggtgtccatctgtcggagatattttgctaaaggggcttttccatgaggtggcaacttggactttccaaataggattctgtcatgatttgtgtaaagttaagcatcatgacataattgctggaccaaggacttagagtgggccataaaacaagtgtttgtttcttttatttatatgtttcttttttttttttcaagacagtgtcttgctgtgttgcccaggctggagtccagtggcatgatcacggctcactgcagcctccatcttctgggctcaagcaatcctcctgcttaagcctcctaaatagctgggaccacaggcacacacctccacgctcaactgattttttattttagagacgaggtctcactttgttgcccaggctgagatagtttcttagcccactgggttgatacttgattctgtttacctataaaatcctgaatattggggtgcaaataagtaaatctaagtttttgcccagtaagggctacattagccacaccttcatgagcacagtttcaaaatgtgaactaggtgttggcttaaatctgccaagcaacagaaagcaacatccccattgggcagatgcagcaggtagcagcagccttgccgtccgctacacgaggccgcttgggatgaaacccttcctcacctccttccctggagagacagtcacgatcctggccttcaccgtaagcttgcccttctcgctcagtgagataaagtgcaagcatgagataaacacatttcaagatgtgagtgctgttgcagtgtgttctgtgaattttcccactatttttaaggaagaaatcattttggttgaaggcatcactcttggttgtgatcagacagaaggggaataagtgcttagcacaaaatggggcacagagcttgacctgcagaaatggttgtcattgtcattactttcattaaactttggcttcagctatgtaaactcaggagagaaataaatgactccagtgacagggaaagcaattttatggcctaatattggccaaatctgggaattgtgaagtagccaaaaaagtagcattacctttgtttgaccaaactgtcagggcaagattacttggtttcatatacttttttttctttttttttttttttagatgaaatggtgttgagaaaggagtttgagatcatgatttttagcagccttgaaaactggtaaatgagaagattggagaataacattattccaaagcagaagctccttcttctcagatgataaacacctttgttgattaattgccatgtgctattaataggccgctgagtaattggaagtgattggcagaaggtctcatgagcccatctgtttgttgcatttttatgaccattttcagcacagggcatcttcagagtgcaatggagaagcttggagagtgacaggccagagaccaagtgggcgggacttggagacgcccatcctgccttgagaggacccaggacagtcatttcctaggggtttgcgtctccttttcttgcccccagtatcagtggagcatggaatgcggaggaagctggttgtttaatctgggattctggaactcacaaaactctttagaaatgcttaggccatagtgggtgaggctgttggcagcagtggcactgaggcagagctatggatgactgccagccgtgcatgtagggtctggggaaggggaggctttcgtctcctgggacagcaatgattgaaaagatgaggctgtatgacttagaccagcggtcctccacctttttggcaccacggacccgtttcatggaagacagtttttccacagatcaggggtagggaatggtctggggatgattcaagcgctttacatttattgtgtactttatttctcttattattgcattgtgatatataaagaaagaattacacaactcaccatgacgtacagtcagtgggagccctgagcttgttttcctgcaaccaaacagtcccatctggaggtgatgggagacagtgacagatcatcaggcattagattctcataaggagtgtgcaacctagatccctcacatgcacagttcacaatagggtttgagctcctatgagaatctaatgctgccactgatctgatgggaggtggagctcaggcgagaatgtgagccagggggagcagctgtaaatacagaggacgcttcgtgcactcacctgctgctcacctgcgatgcagccctgttcccaacaggccacagaccaggaccagtccagtcccgggggttggggaccccgactcagaccattcattctgccctggctgggaaggatgggctgcagtatcctgggcggggagatccacacagaccctcttctctggagatttccttgacttggaagtgattctctgttaatcatggagaccgtgagagcccagggggcagcagattaaatttgtgaataaaaaaatgctctgttttaaagttctgtgcggcgattatagccagacataaaggtggcatctcaaatgaacattagcctcttttaaaacaaaaacaaaaagtaacatgagcaactgaagcctcttgaatatgaatggatttgaaatcgcccacctacggcccaatgctctcaaatagacttttcccctgaccctcacagatgacctcactggttatgaagggacacactgatgagttcttaggctctggatgcctcatggtgtcatttcaaagctgctgctcagggtggaggatgctcattcgtgctgtggctggtgacacgcacatttgctgatcccccttttggaatatgttctgtttctgaagagtttttgcacttagcatgcgtaatgtggataagtagatgaatgtctgttctaggctggaaaataagactcaaaatgattgtgacttaaggtaaaagaaacttcaggttagcagtccttgccaaaaaatgattttcattcagattatatcaagggattggctgggagccaggaacatgaaaagaacaatatttaactagaattcttgaatagttatgtgagaaaatgtgtgtgtgcatgggtgtctgctgtgtatcagtgttggagcccaggcggctctcaagcaacgtttgtgatgtgtttaagaaacacatcagttttgtatatttgttttttaagatcctgctgcagcagtataaaactctcagtggttccagcggcagtcagcataggcaagttgtgcttgcggtaacaaatgaccccagggtctcagtggcttccaaaaaggctcatcctgctgtggtttgcatcatgtctccagtagtctgcagtcctggctgaagatgttaggtgctcttctagtaccatgtgactttgctttagagcacttttcccggctcatattagaaacagattagcatgattttaggctcgaagccccaagagggtatgggccattgtgtcaacctcatgtgcctgtcacagcaaagacagttggtcacatcggttgaaagaatggggcccacttaggctagacactacaggggccaagattaaaaaaaaaataaacactgaataactccctgagaaactgacttcacttggatttaaaggattgtacctacgtgaagaatgaagaggggtgctccaggaagaggaacaagtttgagcaaagacataggagcgtggtgaagctcagagtgcactgaggacttccaggaagttccacgtgagcggtcactgtggggccgagggaagcactaatgaggactggggaggagacgggttagggctggcctcgaagggcgagtggaatggtccatggggcctgcgggggttgatactgatgctttgttttttgtgtgtattcttacaccctttgatgggttcagctgtaaggctttgcttccactggggtcacacaagggggctgtacatggactgggccctcagtttgcatgttcatttgggaattactgcaggactggaatgacttggctggtctgtcaggcttttctgtttatttgtaattattcttctgtccacaatcaagaaaggatttgaagtaattttcaaaaatacagatataaattatggttgttaacatggtgagttcgagagaagcaacttattgaagttgtgtctgttcttttttcatgaatggcctcatgtatttttgttttctatatttgccattgttctcagtgatgagatagccaggggccaaaccgcctcttcactaagaggtaagccattgtgtttccctgttgctcattaatttagagagtttcatacatgctgccagttcctagattgatttttctttgtgatttttgactaaatccttgtttcccagtgtcttgtgttcaactttaatattttactttttgtgtgatgtctgtaatactaacacaagctcatagacaatggctcaaaataaggctttcctaagattaaaattgatcatatgaagccaccaagcaagggtcggaatcagcagaattatagaacacttcctcggctttgcgtcctttgaaacaaagtcaggttctgcgccggctattgacccgcagactcgagtctaggatgcacctgagtgcccaactgtgctgtgttctgagtgagatctctcaggtaaaaggtcaagtccaaggtagagctacttatgcgcaggtaatagtgggggcagaagtgatttttatctcgtttggattcctagctgtctctttcgatggacgatcaaattctaccaagagtcaacacatgctcctaatgagaaacctaatgggttccatgtgtgcatttcgggccaggcccagtgcgcctccctcactgctggcatgtttgcagttaccttcatctgtaaaagtcatatttccaccccagggaaatcgagagtgacaacacgccatgttcttctctactttctcacctggaatagttttaaaacctcagacaacaccaccccgcgatgatgagcatagtgaaactcaagccctctggtttttaaaagcagtgttcgttcttgtaattaattcgccatgtttcattgggaatataatgtttcattgaacattccgtatttcatttttactcagcttaatgtagtatggggtaaaagaagtccgtgaggacaaggtaaccatgcctttatggaatacccagggtggaaaatctgtaataacaacgtaaggagccctacctgggacactcctcacgatgccttcatcttattagacaaggaaatgttgattcactgcctgtcaggtttactttcccctctggcaacgaggaggggaacaggggaagagagagtttgtggtcacccctgcactgagatcctgaatggacagcaaggaagcggctgccaggagtgagtggtgttggggcttcatcctcggggagggctctttgtgcttccaggttacaaactagagaggtggacaacccctgccactggcaggaaagacatgggcaagaggagaggcgctctccaaggtatgcattccttagggtgccctgtcagctctgcgtcttctattcgatcaatgtttgctgagcacctgctgtggacctggtattttgtaagcattctggcagcacgttctcccttcctcatgcgggtggcactcccctgggagaggcagaacacacagggaagtacacagtgagcagaataaatgctcacgcgggacaaattaacccacgcgggataaatgctgcagggaaaccagcatcatgggctggaggctgaggggtgatgtgcagtcaggacagtctctctcagggtgaggtggtcattccattctgtcaggccctggggctgagtgtgtctggaagagggaacagcagaggcaggggactgagaccaggatagtcaggaggtcctagaggaaccacaagacggccccaggggccatgagtagaatcagtgcatggttggtgtggtcggagggaggcagggatcagccaggccagccatgggagccccagcaaggagcttgggctgcattcccacggccatgaggaggctttggagggtctgagcaggaacgtgctgttggatttgaggtttaaattaacccctctgctgaccgggcatggtggctcacgcctgtaatcccagcactttgggaggctgaggcaggcggatcacctgaggccaggagttcaacactagcctggccaacatggcgaaaccccatctctactaaaaatacaaaaattagctgggcgtggtggcacgtgcctgtagtcccagctactcagtaggctgaggcaggagaatcacttgaacccaggaagcggaggtttcagtgagctgagatcacaccactgcactccagcctgggtgacagagcgagactctgtcaaaaaaaaaaaaaaaattaacccctctgctgtggcatgagaatggattccgggggccagggtgcagcaggaagccaggctctgcgctatgcaggtgagaggcgacggtgagtgggccagggtgggaattagatcatattgactccacgtacgggtgccccccatctgtccctcatccccatcccacattcccaggcagttctgcttgctcccctgcagattggcacacatgtctcataaaccatctctcccattgtctaataacatggtttcatggctgtctcctccattagcccaagggttcttcaaggtcagtaccacgttttactaacttcatctgtagaacccagtgtagggcccgaactcccagcaggaacctacattacccctgactcatggactgcggttctcagaacctgacctctgtgggagaccaaagtcatagcctcgtgccccacatggccgtgaggccctgcccgcattcagaagacaggtgacagcccgtgccgctgcctggctaaatgcttgctccacacattttactagtggcggctgagtctgcgtgatggccaacgtggttttagaaatatacacctagattagatgaggcttctgtcttagatgattccaaatgttcttacttggattttgcttaaaggaaaaacaaaactatctacacatttccccctcttcatactttaccaaaaagaaagagaaaaaatgtaagaggatattgactcccacgatgcttcctgcggtgactaaatataaatatgtatgacagatcgcagaaggaatcattaatggcagctgtcagtgctatttaaaatgaattagacctttccagtttccctctagtgtgagcgctgagagacacataaggctgttctgattcatcgtggacctggaagtccattgttcagcttagtcgggagatgtatatgcttatcaggcaaaataagctggcgggggctggtgtttgcgaagcgccaactcgccttctttgtctcataacatttggcggggtgtgctttcctggttcggcacgggacattggtctcttcaacttcagctgatttgaattgggacccacaaaccaggtgggaagcatggcgtttgaaccgtgcctggaatatcagatgagtcctgtgtctgcaaagtctgatagtcagagggaataacaagtccttaaaatgaggaacagccctttccatggttaaagggaagagtggaaacccacgtgtgtattatcggggaagactttcttctgggaacaggtgtgcctgtaacatggtgacttcccactggtctgtttcgccccataatggtaagcattcctacatttggagagagtaggtatattagtctgttcttacactgctaataaagacatacctgagactgggtcatttataaaggaaagaggtttaatggactcgcagttccacatggcttggaaggtcttacattcatggtggaaggcaaaggaggagctaaggcacatcttacatggtggcaggcaaaagagcatgtgcaggggactcccctttatcaaatcatcagatcccatgagacttattcgctatcacgagaacagcacgggaaagacccacccccatgattcaattacctcccacggggtccctcccatgacacatgggaattatgggagctacaattcaagatgagatttggctggggacatagccagaccatatcaataggagacaagggaactgttgccagcggttccctccaccaagacctagagagactgaatgctgcccactttttctcatcttaaagctgagcttccagtgagagcttcacttctgttctctttaattttctttcacttccggtgtttaaataacccaggatcagtttatgtatcatgatatcttctttcaataatctggctgaatctctccaaatggctgggagtttatggccctgggcaggtggacgagtgggcagaagtgagaacaggacttcaggaagtataaaagctcttgtcacttccaaagggcctctttcttcctggctttgaaataaaccctctgatggccgccagtaactgtttctctctcaagtatggaagagaaagccatttggatttttggatgtaattgacacagggtctctaaaagttcttgtttgtttttcgtttgttttgggactacatttgaaagaagaggcatagagacccgcagcccctcctgtcctggctgcccagggcttctgggaataacagtggtggtgggagggccacattgtgccgcaattgttcctttatgtagttagcttcctgttttattttatgctgtgcggccccagcatccagggttttgtgcttggaagatcacacgtatgtcatgggacagagttcctgtctatatggaacatgggccacttctcaggaaccggcctgcagccccgatggacaggctgggtcatcaggaacagacagcggggaccctgcagggccacatatgctctacctgccccaacccaaggctgctccgtagccgtggagttggtggttctggggagaaaggtggctgcaacctgggattcagccccagctccgcagccgggtgtggcagctcctgtgctgggtaggattcagcacatctgggctgaagttttcatcttgagcaccagctaatgtttgatgtgaattgaatcatagggagaaaatgcccacttgaggcgtgagccagttaatttacaaagtcagtgagggaaaatcctgcaggtgcccgggaagggtgagcgcagagccaggatccagacgaggccgggagctggggtgctggctgatgtccccgttgctggatgctgctggatgtgtatggacctggggtatggcacagcaggcctcatcgggaggtctgtggagtgaaagctggggctccccacagctcccttccatgccccgtgaggcacgcccttgtgttataaagaatcacacagtccctcgtggagacggctctcaggggcagtcttgctgatccttctgcaaataagacccctctgaggccaaccatgtacgtggaaaggagcatgtgctcctaagttttccaggaggggaaaggaccaagttcatgtgggacccagctcagagcacagctcacccccggggcagggcagctcatgctaccattcgagcgagtggtggcctcagtgccagactcagcccagcgccaggaacccaggaatccctctcctcctgcccctgcccactgggacagtcatgtcaggaaggaactggacacatgtgggcgaggaggcagccgccctccagtgccacaaggccagcggaatacctctgaccttgcctctcccacccagcgtcaggcagacacctccccctcccccagtgctgcagaggccagcggaacacctctgaccttgcctctcccacccagcgtcaggcagacacctccccctcccccagtgctgcagaggccagcggaacacctctgaccttgcttctcccacccagcgtcaggcagacacctccccctcccccagtgctgcagaggccagcgggacacctctgaccttgcctctcccacccagcgtcaggcagacacctccccctcccccagtgctgcagaggccagcggaacacctctgaccttgcctctcccacccagcgtcaggcagacacctccccctcccccagtgctgcagaggccagcggaacacctctgaccttgcctctcccacccagcgtcaggcagacacctccccctcccccagtgctgcagaggccagcggaacacctctgaccttgcctctcccacccagggtcaggcaggccccccacagtgctgcagaggccagcgggacacctctgaccttgcctttcccacccagagtcaggcagatccctgccctctcccagtgccatgatgccagcaggacacctctgaccttgcctctcccacccagcatcaggcagaggcccccccccagtgctaactgcgccctcaagtggcctggggagaaaagttgtgttgtgagcggaaaattgccactcttatgggaaagatgatgctgtgttggaaactcaagcttcacttggaattatgattccatgagcatgtcgcatgctgccttttttttattttctaggaataattttgaaaggaaatattgtacacattgaagagtgactcaatacagagaccatcgctctaggctgagccggtctgaagcaggaaccaggcatgtgctgcatcctgaacgccaacaaacctgtgttcacggtggtgctggggtggcagctgtggtgggggcaatgccttgggtgtcacagccgccctccctccatccccgggcagcccgtgctcaaggcctgctgtcctccgtgctttcagatgctgggaaggtcaggtgatggccatttgcagggctctgcctccctggatcaaccaaccacagatcagaaatattcggaggaagaattgtgcctgtactgaacatggacagattttttcttgtcattcttccctacacaatacaatctaacaactgtgtacatagcatttacattgtattccataatataagtgatccagaggtgatttcaagtctatgcgagggggtgcctggattctacgcacacactgtgctatttcgtatcagggacttgggcgtctacagattttggcatgcacggtggtaggtcttggaaccagtctcccactgataccaagggacagctgtatactttggcataaatgacatttactagacatatagttctgcaacttacttttgttgtaatttttattttttgaggctacacagcaggtatgtatgtgtatgggggggacgtgagatgttttgatacaggcgtagaatgcaccgtaatcatatcagggcaatgggatgctgtcccctcaagcatttatcctttgtgtaacaaactaatccagttacactcctttagttatttttatttttatttatcttttttttttttgagacagtctcactctgtcgcccatgctggagtgcagtggcgcaatctcggctcactgcaacctccgcctcccaggttcaagcgattctgcagcctaagcctcgcgagtagctgggactatgggcaggcgccaccataccaggctaatttttgtatttttagtagagacggggtttcaccatgttggccaggctggtctcgaactcctggcctcaggtgatccacccacctcggcctcccaaagtgctgggattacgggtgtgagccaccgcacccggcctcctttagttatttttaagtgtgcaattagattattattgagtacagtcaccctgttgtgctaacaaatcctagctcttcttcattctttctaactttttctgtgctcactcaccgtctgcactctgccctcactacccttcccagcctctggccacctttcttctcctatctccatgagttcatttcatttttagcttctgtaaataagtgacaatgtgcaaagtttgtctttctgtcctgcaacttacttttaaaatttaatatatattgaaatacatgccgtgtcggaacaaagagttttacctcgtttaaaaaaaatccccgattaaaatttatttagtcatttttggtgacgttcgtttgttgccagcattgtccctcatgagagccagtgtttttccacaatgcagtgagcacgtctgaaaatgtggcaaacgtctttacattgctttagaaaggactgcactggcccccgtgcctgccagcggggtgtgagccgcctgtggggcagcctctccggtgcgcgggacgtccagcccttttcgtttctgacctggtggaaagaaaacaaagctttgtattttgttttgatttctatcgcctggttctgctggggtaggccgtttcgtgtttgagcctgtttgtatatttctccttggatggagatgttctctagggggcctggctgtttcttgttggtttgcaggcgttgttttcctagcctgccattcactccccccggtcacctgcactgcattttcttcctggccgtctgccgcttgctggttttctgctcttcggagttcttcatccggcagtgcagccaggagcccatcaccccgtgcacctgtgagacgctgcggacaaggagtgtgtcaatgtcccatccttgcggcgcacaggaggttccaggacccaggaagcctcaacattctctctgcctgtgtggcatgccggaccaaggggcccctggggctgagctcaggctctggggaccccacgggccccatctcctcccctcccctctcttagctccgcaggtttctgacccgccacaggggctctcgcctgcccgactctgtcctgcttcttctgctccagccacaggcttcgcttctggtgttggctctgctgtgtctcaggtttccacctgtggaaagcatatacatgatgaatgtgctacttcctcccctggaggcaaagcttagttggtgggaggggtctcaaggttgtgaatggggatctgggggtgcagaggtgccagggtctctggaaccatggggcagccgcgtgtccctgaagcagcctgtatctggactaatatttcctcttccattaaaattaatttagcaatctccagcgatgtgccaagccttcgcgcattgcataatgcctgcgactttggcctgtaaatttatttcaccaccgttatctaactctttaccttgtaagctgccttaatacactgagccttgcagaatataatcttcacagaaaaccgaatatattccacagcactgagagtggacatctctcagactggtcacttcttgtgcatcctggctttcaattcaggttaattccacttcctcctcttcctcctcctcctcatcctcctcctcttccccctcctcctcttcttcctcctcttccccctcctcctccccctcctcctcccctcctcctcctcccctgcttccccttttcctctggaaggtgatgtgagtgcagtacgatgattcaccccagttcaccttccactgggtgggaacagcgcttcatgccagagcctggaatgtgccccgttagaaacatccgcaaatgaaaattgctttttagcttggttggtttaatgaaatttatctttgagcataatggagaatgatgatttttcaccccagcagccctgctttgtgctgaaaggacttatcttctgtgtcagtgttgcaggactctgttttcctgcttgtaggtgtgaggaatcgataatttacagggatggggattattctgaagattctatggcagtggttttcaacgaggggtgattttgccctcaagggacattcgagaacgtctagggatgttgggtggtgctggcatcgtgtaggtggaggccagggtgccgccgaccgtcctacagtgcttaggacgccccccaccccccagaggcccaaatgtcccagcgccgaggtcgggcctggctgctctaaggagcggaaatgtctcccggcagcacgtgagtgggagagggcggttttccagacagtcctcctggatcccccaagaccctggagtcaaatcattctcctttgaattccaagacttacctcttcctggcaacgtgacctctctgaaccacggtttcctgacaagggctctcgagatggccatccccactttgctgggtccttatgaaaatggatccactgatgcacattgacagcttagcacaatccaggtggtggctgttgctgctgctgttgccgttgctgttgaaataaatcaaagatgataattgaggggagagagaagagacttccaggctttcccttgccccacatctgaggggctgtcctgacccctccctgtggctcagccccgctgcacctgctgggttccctgtatggcctggcagtgtggagcccacattgcttgccgtggctgaccggggcctgcccaccacattgctcggccaaggtttagccctggccttcacaggacctcgttggcttatcgtcccggggatgaccagcccagttttgatcctacactcctagtcacactgtcatgttgctggaacctgccaggggtgcaggagcggctggagagcatctgtgaggggagagcagggcacagggagcctctctctggctgccgacgcagcttactccgcacctaagagcatcctcttaattaggcatcaccggccacatttggaatggcgcattaacattttatgggccattttcccataaagaaaagcaaagccgatgtaattcttgctggctttggggttttggcttcacactcagcacatcagacaaaaccactgtgggaataaaattcctcaaatgtggctgcagtcattgagtagggagaaaaacgcaccgttaagtcctttagcaaagacccctaaatcctttcatttccaggcaataaacactgaacaaacctgccctggagaattgaagtccttgaaaaaagctctgagtcaagggggtgaccaagaaagcaaaacattcagaaaggctggagcaggaaccggactctcattccgcctctgctggcacaaaactgtggacttagaggaaaatgagcacgtggccagtcatccatggggatttaaatgtccttggttcttagcagtgacctcggcaggactgaaggggaaggtgattgggggtgaaggtacaggtcttcctctcgtggaaatttctggatccaagacaaacgtgaaagatgaagcaaaagaccacgtgcctcataaatgaaaaccaaagtccatcccaagctcccgcacagtccttgccaagggacggttatctcattgaacacaagctcagcctggttttctggtctgagagaaaaaaacagaggcagcttaagacatactctctgagaacactgaggagcagtagctggtagttaagacaaagggagaaaccatgtagacatgcacacctgtgtgtgtgtgtgcactgtgcacctgtctgccgcctgtctgtgcgtggatctctgtctctgctcatacatgcacctgcacacacatgcgtaccacacatgcgcactacagtcagaaggcctgagaagcctttcaggccaccaggctatgctctatgcttgaaaaatttcctgccttctccacagcctgttagggcatgagtgtttatggaataggaaggtggtggattgttctggaaatgatcaagttgtcaagagagcatgttatggggtttcggatgcataaagtttatcatgcacttggttaaagtttctttccagaagtcaaattttctttttagtattttcagcaaattgtctttcttcatctgggcatcccgtggaggtaggatgatgaggcagagcagcagcgtttctggagcattcactgggcatcaggcaatgtgccagtgcttttctatgaagtgcctcatctggaatgaccactgttcctattgaatggacgagggattatcttggaagagggttgagtcccttgcccaagaaactgcatctggaaggcaccgcagctggactgtaacctgctctgtgtcatcgcagcaccacatcctcctgccaagcagcaggccattccccggcggagaactgctgtttcccagagtgtccaggtaaacaagggtttaggcattacccagcccagctcagccagcagccctgagagtctttacacccagttgttgatgagtgaagccaagcggagaaacaccatgcctcttgcttgcttttatctcctcaccattaattgtctgactacattttcttcaagaggcaacaaagagtaaaagccgtgcagttgcttttctgtttagctggttgtaaatattcagccagaatttgactgacagtgcaatattatgctccccaaagcttgcaccgtatgtgaatattttaattaggattgtaacaagctattgagaaagtttgagctaaattggttcagctgtttttgcattagtgaagcatgaaaagaaatttttttcatctattagaaaatattctgtttttaaaaaattaagccaaagcaatggaacatcagccagttttggatacttagttaaaaagtcagcagattggatctaggtggggattatctggacagatttgaaagatgtgaaataaagttcaaagatgttattcacgtttagcctctttctctcggcagctgtttggaaggaagagatggatctcaaaggcagcccatgtgctaagagacgagggaatctgtagtgggcctgaactccgtggggtgttccagggttagggtcaaccatgctggtgaccttctccccctcactgagatgcggggtgccaggttaacatgtgcccccaacctccgcccaggctagaagcatggccatgccgccatcttgggaatacactgctaggaagttccttcctgtgttgagctgaaacctgcctcctgatttcgtcctcccacaccttggccctcgcttcttctctataatttgttagttatccagttttgctttgtttcagcctcgccttggacatcgtgtgcccctcccagcattgtctgagacatccggtaggcagggcagaggaggaccggctggtccacacccactgctcaccctgccgtgttgcagccacacacactgttgggaaatgctcaccctgccatgttgccgccacacacactgttgggaaacctctgggtttccccgattcctggaacctgcccttcatctctgtgaggtctcacgtgagctcttcactctgatggtgatgaactctttatgtttctcttcttaccaattcttcctggttccatatccccattcctacagggaccagacagcccccagggggaacctggccaccaggcagcccatgacctgctgtcagggatggacaagtggtcattgcatctcagtgtaggtccagtgttgctagagcttcacctcttccacaagaaaccagaaatctggaattaaatgcaaaatcccctattttcaaatagtggcagctaatccaagggttgtaaaaacacagtgccggcctcacaaagcagacccgtgtgccagccaggaccacatgcctgcaagtgatctctggccttgactctatgatccccaagggcaggaacaacgattctttgctttttattttttttccccagtcacccctacaacaccgacataattatctcttggtagttgttcctaagtgtatttggcagggcgtggcggggagaacgatggcgtttttgtgtgtcatgttcaagatttatgacaattgcacttggtctttggatgtgcagtagtgcgctccttccctgtcgctctgggaagacatgttaggactcataactgtgggttgtgctcattttcttctgcctggatatgggtactttgagagattcctgtgagcaaacccccgggacgtgcttcctgcacagaaacctcgaaacccctcctttgagctgttggtttaggatgaggagtgtgctgtctgccttcctctccctcagccgacccactgtgtgctgagtggggtcatggtcctgcctccttatttcccgaggcaccaagccttgtgccctgcacacagcacccacatcagtcaggctatgcccgcaggcctgacactgacctccacgaggggctcagggtccggcatggccatttctttgccatatccccaatgcctagtagagggcctggggcagagcgaacatttcataaatattggttgaatgaaagctgaataaactataagcttcccatcacctccctcctaattatttttgatgtctaaatgaggacaatttaaatatcagcattattctgctaattagtaaaacctaaaatccagtcccttgtaaagagatatccccgtattttacacagagagggtcaaatgcacggcccttccctggttttctattgcaaacctcacatttgtcttgcgaacacatttgcctgtttttgaaggctgggtgctggaagcttcaggcaacagtgatcccggccagggtctcagacagtaattcccacccagggaacagtcgctttaatgcgggggggaaggagaggagacctgcatgagccacggaaaccgttccctctacagggagccgtcatgcggcatgctcaccgtcagtttcagcccagggtgacgggggggtttactccgtgattcaccggcttttgggttccagagcacctcagatagaacaggggtctctaatcacagtgtgccacagcattcacgtccttatgcttgtcagagggtcaggttgggaagccggaatgtggagagagccaggcagagtttcccagaatcagccagcaaagacacatgcccgcatttcactccctggcagcctgagttcgttaactcatgggaagtttcggtgtcagtgacttctcatcttggctttcttttaataaataaacaatgaactcacacatcaccacagaaagcccctcttaaacctggcgaggtatttattctgtgtcgttggctcacttccctaggagtttgggggtggggggtggactacgaggtcactcatttgtcagctacgccgaccccgaattctgtggccatgcgcctgtgtgcgtgctctccaccttccctgtcccgggagaacctatggtgagaggccacagaggactgggcaccaggctcccctgggagcaccgctgtgaagctcccgacttccccagcacgcaggccgcctggacaggaggaggttccttcccaccacctccacgcggcaggtttgaagggcgtaggagtctgggctgagtctttgctgtgtcccacaaagtgatacatgaagcaggtgctccgtgtcccggcctggcaacccctcggtgcttgtctttggggacaaggacttagcatcactctcttctctcccacatcctccctttttcagctttagcaagaaaggcagagaggaagggagaaaacctaaaggctgcattctgcacaaactgctcccatccaagtctacagtgtgccctgatgaaagccaggctgtgggggagagaaaagagagagacagaggcttcaccccagcgagatggcagtttaaagagagaggcctcagaaagaaagtgtttattgagtgatcagccataataaactcagataaggcaacagatgaaacaaatcttcctggaaggaaagtgatcagagaacaggactttctggaaggaatagcagatcataaccagaagctgaaatctggagctcttggtgagatcctggttccaaaaagaagcaaactgccacacccagttttcacttctcattgaaccagaatttaaccagaatcactaaaatccaggggaggctgcctgtgagacagagtctgcatgttctcggcatcttggggaagggagatttgccacatcagctcgcaggtttgtcgggcagagccagagaaactgaactatgtcctgggtgtgcagatctgtgctgggcacagccagaagctgtcagacaatgaaaaagtgtgttccttacccttgaggatctttccagggtatgaaggataccaggtgagacgtgggagagacccaagaagtagaagaggtgcctattggggctggtgtgtgccctcggagcagggcagaagaacattggagagagccgcggtcaggatcccgggtttgtgtctcaggtatgagcctctgcttccatcagccatgcattcctggacagttggcatctgctggtagtagctgtgagccagatggaggacgctgtccagtgctgcagagatgagaccctcccgcctaggagcagggggccatgggagtcctgctctcagtacactgtgaagagcaaagtaacggagacacactcagaatgtcaccacccagtccagcctggggacatgtggcaatggagggaagtcagaagggccccagatgttccttacggttccactctgaacctgatattggaggccatgggtcatgggggtttctgaacttcacacaaaatggaaaagaaaactgtaaagaatctgtcaaaagcagtcagatgatcagaggcatacgaactcaattctagaaaggaggctttggtaactaagggctgtatacttgtgaaccgatagttttaaccccatccatcaaacaaaaagaagacggactggttattcccatttccacggagaggcaaacaaaaggaacagcatgaaaatgtagcaggaggagggtgggtgggaggcctgagagaacgcagagaatcacagtttccaaaaaggggatgcccttcaagttctgttattaggagaggagacaggagactcagggaaaagcaggcaagagacgaggctggcgtcatagagttgggaagggagcgacgtggagacgacttggctggggagcctggggtgactctcaggctgagactgagagggaaggagccctgagggttgccctttctggcaacatggagctcagggccctcccgttgctctggagaccctgctagggtttctgggatgggccctcctttgccaagagacttgcacgcatggatcttatgtgggtgggagtgggggaggatgaggaggtattatttcttagctttcatgatcacatgtgtcaaaaaagagaagggagaacttgtagaaatgggcagatgagagaagcacttggcaagttgatgagtatttgtaaatcactcccaggtgtgattttccaggggatggggagggggatacagctgcagtgatcaaaacagacaaccagacactttccttggacctctttcttctaatctgcagagcatctgtctactggctttggttccgaaaaggaagatgctcccattttaactttggtttccgacagtcgtgcgtggaggagcccggcctgactccttccttgaacagacatccgctgagcagcaggtgacggacccaacccaagctcagggtctaagaagggagagctggagcccgagtcaggaaagcggtgcaggcatgaagccagggcaatgaggctttcatcagtctgtgctcgggcatagggaggaggtgccgtggtgcggaacccggggtgcctgcccgcaagaagaggccagcccagcacatagctttctctcatgcccaagtactgttccagacccaggggatcagcttcctctcatgccccaggtactgttccaggcccaggggatcctgtgcacagcaagtaagccaggcatctgccatcccggagcccacactctccgagaggggaccagcaagtgtcttgcccagttggagcagctcggagagcagtgggtgctggtgaagaagatgcagagggctgcgcgtcccttagccagcatggtcggtgaagacctttgtgaataggagacatttgggctgagacctgagaagcaagaaagagccaggaaggcaatgatgaggaagaagaaaggtccaggtgggggcacagcaagtgcaaagcctggcagggggggatgtgcttgctgcatttggctgtgtgggccttggggaggggtttggggttttggggtgatggaagccacagagtattcagcagggaaggggagagcggagacgtggcctaggacagcgtagtggagagcggagacgtggcctaggacagcatagggcagggcagagatgtggcctaggacagcgtaggggagagcagagacgtggcctaggacagtgtagtggagagtggagacgtggcctaggacagcgtaggggagagcagagacatggcctaggacagtgtagtggagagcggagacgtggcctaggacagcgtaggggagagcggagacatggcctaggacagcgtagtggagagcagagacgtggcctaggacagtgtagtggaagtgaagggaagtggtgagattcagcgggtcaggatgggggagcaaaggggacttgaggtgaagacacatcacagtcctgatgacctccggggccatcagtgcccctggctggatggggtggggggcactccccgagacaggggcacctgagacagcattagggaaggaaggaggtggcgagaggatcatgcgttctgtgttgggccagaggagatcaaataactgccaagtacaagggtccagcaacgtgcatcattggtccaactgggtctgagtccaaagatgccattcctaacttttcaagaatgtgaacaggtggctttttacaaagctccgtgccacctgtgtcctgtgcccttgtgccgtgtcacatgtgaactgtgtgtcctggagagttgaaaagtggctctggactctggggttcccatttgtgaggacagtgagtttcttccagctctgacatctcctcattctggtgagctgaacctgctgcatccgtgccttagaattgtgtctgggttccaggacagctgccggcaggtttggaggctgagcactggaccgaggacctgatgcacatgtgtgagctggccattttctcatcctcccatccgtttgttctttaacttattcattcatttatccatttgctcaacaaatatttgctcaacaaatattgttgagcatctattatctgccaagtactgtgcagggtttgggggatataacggccaggaaaacagatagattccttgtccttatggagcgccagtcttttgagaggcataaaagaatctaaatatctctctctctctctctcacatacacacacacacaaacacacacacacacctatgacaaatgttataaagaagtcctacacacacacacctatgacaaatgttataaagaagtcctggactcaacagaagtgttaaataagggggatctggccaagtcaggcttcctgaggcagcaagagttaggctgatgccagggatgaagggcaggtgtcaaggaggagttagtgttcctgacgggggccacagtgcattcacacaggccagaaggtgagaaagttgccccttcgaggagagaatcaacgtggccagagctcagaggtagtcaagaaaggtcaaatcagggagtgaaagctaccaggtcagtgtttctctaggcaagtgaattggaagaagtagatatagaaatcgttacagatggtgcctgacttagaatgattcaacttaaattttcaacttcatgatgatgtgaaagtggtaacagtagaacccgtactatgatatttggtgagagaggtgtattaaaggcattttcagcttgggatattttcagtgtatgatgggattgttaggacacagtcccctcataagttgaggagcatctgaacttctaaattgcttgtggccagcatttccatgtgtcgtttagacactcaccatgcattaacccatagaccaatatgccatctgaagcaaggacaggaaaaggcctggcaccttgtccagcagatccccgattccagctgtgctctctctaccccagctcaggctcatccagtaggagctgaggatttaggagggttttctgatccagtggccaggcaccttgggaagtgacgtctcccagggaacccacatggaagctggtagagacacaagccgtgggggtggagccattgggaggactcttagatcaacttgccctggtctaggcaacaccgcagggctatccctgggggctcctcacaccccgagatcaggcccatgaatgttcacagcactgcatgagctcagggctccccatggccttggacttgctacctggagggctcctctgtagctgcttctgcagatggagatcagctgcctccacagggctcagcctgggcttgtctctgttccgcatcaggaggggggttccaagtgggaccttgaggtccacctagccaggtcacagctcaccctctccttggctctcagacttctacagacatcctggtgcacatgctgtccataaacatgtgcataaacatgcacaaagttgtgcttttttaaaccccagggtggagattctgacctctgtcttgcttctagtggatgaacattaaaagtagtgaaatagatctggtttcaaacccaagcgatgatgaggctgcctcagcagaagacgatgagaatttagaagagttgcaagatcccttgtggctttcacagtgcggcccccgacgagcagtggtgacagcacctgttggaaatgcagaccctcaggccctcttgcagagtggggacagcaggaactcgggtggggagcagcagctttgttttaaggagcccccaggggatcccaatgcctgttgaggtttaagaaccactgccctagaccacatgtaccaaacttggcccatgatggattccaagatatggaatggatctcctttgaaacaaacttttgtcctctagccatttacctgtagatttggagtctataatgcacctcagtgcccaactctactgtgtgcttggtaagatcatagcaagagtccaaggtaggtcatcatgggggcagaaatggtttccatgttgttttggttcctagctgtcttttttggtgaataatcaaattctaccaagagtcaacattttgctcctaatgagaaacctaagtaagtacaaagatgtcttcttcgtggggcttggcttctctttgtgtttgcagatgtctgttaggagcattcaagaacatgggcgtggctggtccatcacgggagggacggggtggaaacctgagtggctcatagtcaacaagggtcagacgggtgatgagtgctggggtatgaggagcaaaggggacaggaggcggcactcactatctccagaggacccagaaaggcttctggttggagctggggggtaatgagggtgtggagctgactcctgagggtgggctcagtgtgggggtcgagaatgactgtgagccaggatgcagctggcgagggaagctgggtctgaacctgccagggcctggtgcattggtgagagatgagctactcattgacgcagcagagtccagcacagcagagagaggctcagaacattagtggggctgcaatggggcgtgcctgcattccctttggagagacagtaaccaagctcactggggcatggcctttgagaacgctcagatcaacaatcaataggatttgcagatagtgtccccaccttgctcctgagatccaaggcaaactccacacaggtgagcaagattggattccacacaggctgggagtgttgagaatgccctttctaaagaggatgcatgtatgagctgggagataatttaatgatagtaaattacccaaatgcggaattagacaggcatgcagcaccagagcccaagttttggggatgtgataatggttttcaggcagctcatggcttccccagtggtggccggccagccgcagtcagaaggagggtaagtgtcctgtgggaagaggttgtctccactgaagcacagttctgctggagaaaggctggagtctttgcagtcctccagggctgaagactcaaccctaaagagatgttcctgagtctcactttgaattcattcctagcagttctctgcagtcctgggaggtcattctaagacgagatttctgtcttggcttagagtctggtcaaggtagaccctgtgactatttgggagatgaacccaagaaacataaggcgggaggctggggaggtgccaagaccagctcggtcggggagaccctaacccagcggtgctagaggaattaaagacacacacacagaaatatagaggtgtgaagtgggaaatcaggggtctcacagccttcagagctgacagccccgaacagagatttacccacgtatttattaacagcaagccagtcattagcattgtttctataggtactaaattaactaaaagtaccccttatgggaaacgaagggattggccgaattaaaggaatattgggctagttaactgcagcaggagcatgtccttaaggcacagatcgctcatgcaattgtttgtggcttaagaatgccttcaagtggttttccgccctgggtgggccaggtgttccttgccctcattctggtaaacccacaaccttccagcatgggcgttatggctgtcatgaacatgtctcagtgctgcagagattttgtttatggccagtttgggggccagtttatggccagattttggggggcttgttcccaacaggaagaaaaacggtaaaggaagaaaaccataaaaacagcatattaacggggtcatagccctggacaactggagcttgggccctttgcggaccctccagacaccacacagaacacattgcaggcaacgagacagcggggcccatcgaccccacccaccccattgctgacagagagccatgccgggactactcactcgggcagatccagtccacccaagccctgactgagcaaatgtgcaggtcctcagggaggagggcgtgtgccaaagcagccaccagagccgtcacttcccccaggccagggtgggacagggctccagagtgcctccgggggctccctgagatcacatttcctaacacacctgagagtgtcttcagttaaatgctcgctctgtgctaaacacattctggagctgaagcacagctgtaaacaaggctgacacaagagacagtcagtaaataagtggacgaatgagtaaacagcagagctcctgctaattataagtgaagccaattaaaaaaaaacaatggagaaagtaagaaagtgctcaaatagtggtgggaatgtgataaaagaaaaccacagaagccagcttgaaggggctcccactgacccaaccttgagcagcttgaaggggctcccactgacccaaccttgagcagcttgaaggggcttccactgacccaaccttgagcatcagaaacaatgacagttatagatcataacctccagaataaacaggagccccgagtccacactgaagtaaatagaggagaaaggaggaacagcactttcttgcggcaaaatgtcagctaatcaatgagaagggaatcatggaatgagaaaatcaccatttgacaagcatcataacaataattgattcaggtcagaagcctccgtagatgctgaaactactgagtggaagtttgaggacaagtacaggatgtatattgtacattgcctggaaatgcctttctccaggatctttttttttttttttttttttgagatggaatcttgctctgtcgcccaggctggagtgcagtggcatgctcttggctcactgcaacctctgcctcctgggttcaagcaattctccttcctcagcctcctgagtagctgggattacaggtgcccaccaccacaccaggctaacttttgtatttttagtagagatggggtttcaccatgttggtcaggctggtctcaaagtcctgacctcatgatccgcccgcctcggcctcccaaagtgctgggattacaggcgtgagccgctgcgcccggcctctccagactcttaatgattacaacgggaaaaaataaatagtaacttcccactggagaaatggcacgtacctccttgctgtgctctgagtgttttatgttcctgtgttgaaatccttacccccaaggtgggacatttgggaagtgatccatgagagtggagcctcaggaatgggatcggtgcacttagaaaagaggttccagagagaacctgcaccccatccgccaggtgaggacacagcagaaaggcaccgtctgtgaaccaggaagaagcctgcaccagacactgaatctgcaggcaccttgatcttggacttcccagcctccaaagcaatgaacaataaattgctgttgtttataagtcacccaaggaatggtaatttttttttttttgagacagagtcttactgtgtcacccaggctcactgcaacctccacctcctgggttcaagtgattctcctgccttagcctcccaagtagctgggattacaggcatgtgccaccatgccaggctaatttttgtatttttagtagagatggtgtttcaccatgttgcccaggctggtcttgaactcctggcctcaagtgatctgcctgccttggcctcccaaagtgctgggattacaggcgtgagccactgcagccggctaggatggtattttgttgtagcaacccaaaggtactaaaacaccccttaacgaagtaatcaaaattaatatcactggtaattgaacaaatcagtatcactgattgttgacacaatccactgagaaggacgcagcatcatttttgtgatatatccctgaaaatcccgaatctaatcatgagaaaacatcagagaaacccaaagtgagcaacattctgtagttcgtagcctactatcgtcaaaaatgccattttcatgaaatgtatagaccgattaaatccagattaaagaaaactcctgtcaaaacagcagttgaacccctggcccaggatagtcttttgttaaaagacattgttaggctgggcgcagtggtgcacgcctgtaatcccagcactttgggaggctgaggcgggcagatcatgagttcaggagttcgggaccagcctggccaacatagtgaaaccccctctctactaaaaatacaaaaattagccaggtgtggtggcatgcacctgtagtcccagctactcaggaggctgaggtgggagaattgcttgaacccgggtggtggaggttgcagtgagccaagaccataacattgccctccagcctgggtgacagagtgagactctgtctcaaaaaaaaaaaaaaaaaaaaaaaaaagaatgacatcgttggggcaataagcagaatctgggttgggtctgtagattagaagatggcattgcatcttgctatgtgtactgtgcatacgtaagaagatgcccatgtttttagaagaggcacatggaaggatgtattagagatgaacccagtggggttctcaaaatctacatgaaggaattacaggaattatttgtcctcttcatgcaactttctgtaaatctaaaattctattaaaataaaagttaaaaccaaccaaaaaaaaaaaagcaatgtcaaatggaaagggacagggctcgggggcacttcagacaggggatcacagaagacccctgcagaggcgccatttgagtcacgaaagaggagaaggtgcctggccacacaaagatcagagggaacagagtgaagcgcccccagtggggaggactttccagagtcctggggacacaaaggctggcatcctggggacagcagaggtaggcagcatggcccatagggccttgtagaccccgggataggagcggggttttattctggtgttccaggacctggtgggaaggtttctgagccatgcagggccccagcctggcctgccagggctgcatcctgtgtctactgctggtcagagaactgactggggttgggggaagggaggccctgcttttagccaggtggcagctgatggaggccttccccgagggtgggtggccctgggaagttgtgcgtagggaggagccaggtcaaggagggccctgttctttcacactgagctcctggctggccctgggggtggctgttgcctgtgaaggtagagtgctgggctggacctctgcatgccttcaaggagctcccggctctgggatccatgcagaggagagtggtacaggtgatgcacgggagaggagccaggtggtccctgggcatgcagggggctttgcaaccccgaccacggcctcctccctcagtctgtggcctcctccctctccccagtgccgctgagtgagtggtggtcattattcccaccaagtccaggggtttcctcctctatagacagggagtatcagttgcttctaaggattaaactggaaaaggattcaagccagcactgccaggaagggcttttgacatgcctgcattaagggaagacatatcattccagtgagcatttaaatactgattacatcttttgctttgtaaataactcaatggtaaatttttacaatattgtttttacagagactgtaatgaggaggcaatttttctcccctgtcacttggatattaagctttttaatgagagtacacaaatgactatataaaacttgggatggtgagagctgagttgggacttaatgcgaaattaaagttgtgcaggctccagctcactgatgaacgagccttctgtcattgtgaggagcggaatggtgccggctctttgtcctttctccctccctttcccccgcgccgtttgtcctcccgaggagcctcagcgctctgggcaggggtcgcttggagaggcttcctgggaacggggcgggagcgcgcagcctgggggattttttatttgggagcatgcctactttttaattggccttggtgttaatgaatggattcgttctgtttggagcgagcaggctgggcactggagcgtgtaatctgattgcagccgggagctcggagccctgcagaaggctctagagtggcagggactggtttggccctggactgtgcagtgctggcggtgatggggccagaagggtgggaagtggggagaggtgggcacctgcaggatggaggccatcagggccatttgccctcttgcagcgtcccccaggcagacccccttcgggctctgaggccggggttggatgaaggggacccttcctggggcagcccttggtgtccagtggacattgaatacctcaatacacacgacttgtccccgcaggtaagaagtgtcagacgctgcggacgtgttttcaccctgccagctctcagtgccatcgggaaaagccttcaaccagccgtcgtataggtggactgtctggttattccccagacagctcgtttttcttcctgtggcttctcagcctttcagctcattctgcatttgaacaatcccttccccaagaccaccgggcaggcctctgctgcgggccccgagcccctaccaaggcctgtgtgtgttaccagcttcgtggctgggtcccggcatctggaggacagaggccatggggctcccgtggagacctcatcacgcacagagcagccctgggctgggccgcatggaaggcgaaggctcgagtccagaacgggcaagagtgtgctggtgcacatcttgaaggcagattttgaatctgaaatcttttcctgcggtgatgtaaacccccaccctcaccatccgtccctcgcccctggccaagtgtttgtgactgtcatttgggctccttgtaccaagcccagtcttgtggagatgacccagagtaatgtttaatgaggtcacgggcaggccgcttgtgtttgtaaacacgtgcacattccaggcttacagggctctgaatttgcttctgtgtttggattccatacttttgctccacatttgtcacccaggtctctccctcctgggatagagagaagccgttctctgccgggtgttttggcccctaagtgaagcgtgtgacctgtgtggatgccccatctacccctgaaagccaaactccatgtcttcctgatggcccagccgttgtctgtggcttggctcctgtggggaagtcacacagaggtgacctggcccatgggtctgtcccatgcaggcacagaggcagccgcaatgggaccaggcacccagccctcctgcccagtgtttacatcagaaggaaacagcgtgctcacgtgtctacccgcacacgcttcgcctccttctccgtgcagcaccgccctgctgagcagctgtactgtggactcttctgcctgcaggtccccatggctctatttgcagacccacctcaggggcctgacacagactaagcagcacagattcatatttcagtaaagggtgacatccaggaaaagctggagccctgccggacctctggattgctcctgggtcaccccaaagctgtggtggacttgggtggctgcaaagatcttggtccccctggcatggctccagttctcggttaccctgacgtcccctgagatccagacctggagccaaccctcccccaacccccacccacgtgccagccgggtctcagttttgccacagatgaggagcaaagcctcccaggtttctgcccacataggagggatggccgactcctagtagcaggacacacttaccaagctagactatttctttccacacctacagggaaggctaaaaagcatcctggaggtttccgggaatgagattcaaagggcggaggcctcagcagcaggcgtggacacgcaaccccagccccgtgccctccgcgtccttgcatgcatttcacacgatacttcagatttttttttcatttagatgttaacgcttttataaaaagtacttttcataaaaatcctgattcctggctaattttctagacagttggaggatttggcttccagagcccacattgctgcaatgccccatggctggcttagggcagcagctgtcccttaactgggcacgtcctctgtgtggccgacactcccgcccccgtctcaacacccaggtgtgtgtcctgccggccccgtagcctggaacaacaccctgtgtcctgtgccctgggccgtcagcactaggcagctcctctcggtgagggctgagggcattggggcccagcataggccccagctcaggggagagccagggatcccgagcaggagggcttgcacccgttgaatgaaatgggctatgccctttagccacttgttctgcattgttggaagctgattcaaagacccttttattgttctaaaaacagcaatgatattctttgttctttgaagataatgtgctggatgttctcccattacatttctcataatgaatgtcgtcctggggctcgcaggaccatttggacttaatggagaaaaagcagcagacaaagctgtagcaattccttgctgcatccaccctcccagcaaaacgggattagaacctggggaatatgcgttccgatgaccagacttacacctgaattgccaggtgaccttgggctgattgtgtgggatatttggggctgttttgtccactgaggaatcacaataatgtgccttcccctctgggtgccatgcgggttggctgttgaatgggttggaaagtgatttgaacacatcgagggcaacataaatgctaagtgtgatttctaaaatgcacagcagcttgaagaagtagacatatgtgggtgactgtataaactctgaggactcagtcacattaaacatatggatacacctgttctcttcagaaagtgatggggatggggcaggtgtggaactcgtggggcagtggtgttctctagaggtggggtgtggctggcagtgcgcacggcgggtgtggagggtttagcgatacagagcccgcggggctcctgcgtgatggtgacagagcatggaccccaagtttttaaacatctatcaagcactgtcacagagctggcactgagcttggggcttgtaggttggcagtagcacctataggttggcactagctccctgaggagctcgctgtctgaaaggggagaagcatgtggaaaagttgagttctgtgcagcgtgacgtggaggagatgcgtgaagctggaccaggggccgtccccatgcacaggactcagggaaggcttcgcagagaaggtgatgactggaggaaaggtgcagtttgagggtgactagggcaccccatcttggcagcgtgacatgtcgtggcatcccctgggagttacctgggagtcctgagagggtctgggaggggcaactctgcttgcagactgcccgatctcgggtcctggtgctccactcactttccctgtggcctcgggcaagttatttaaggtacctggacaacagtttcctcagctgtgagatgggatgacggtagtaccgatctcacacagttgtcacaggtgtaaaccaaaaataaagttctaagcaccccccaaccatctgaacggactctctcctaggccagggctctctagaatttaacctgaaagatcggtttgggccttgagtggagttcggacatgcctccagggctctctagaatttaacctgaaagatcagttcaggccatgatgggaagtgggggtccgacatgcctcatgatacctctctggcattaacatcaacacagtcctcaagtctgataagaaacagttgcgacctatttcttgggaagcgtgccgcctggaggctgcatctgcattatacagcttcggtctccacgacctcctattgcaacccagacattcctttctattgataactcttccaaccaattgccagttagaaaatgtttaaatctacctataacccggaagcacttgaatccttcaagtcatgccacatttctggaccaaactaatgtctttcttcaaggtatttgattgtagcctcatgtctccctaaaacctataaaaccaagctgcaccccaaccacatgtttgggcacatgttctcatgatctcctgagggctgtgtcacaggccagggtcactcatatttggctcagaaatctcttcagatattttacagagtttgactctttttgtcaacataggagtgatgcttagaaaagttcatggtacctactaagtgcttggtaatgttgggtgatggtagcagtgctgatggaggtgatggtggtgacagtggggaggtggtgatgaatgtggtggccatgctgattgtgatggttggattgtggtgatcatggtgatcatggtggaggtgttggtgatggtgctggtggtggtcttggtggtggtagtcatagcactggtagtgatggtgtggtttattgatggcagtgtgattgtcttggtggtggtgatgatggtgtggtttgttgatggtagtgtgatggtcttggtggtggtgatgatggtggcgctggtggtggtcatagcactggtggtggtcatagcactggtggtgatggtatggtttgttgatggtagtgtgatgatcttggtggtggtgatggtgtggtttgttgatggtagtgtgatggtcttggtggtggtgatggtgtagtttgttgatggtagtgtgatggtcttggtggtggtgatgatggtggtgctggtggtggtcatagcactggtggtgatgctatggtttgttgatggtagtgtgatggtcttggtggtggtgatggtgtggtttgttgatggtagtgtgatgctcttggtgctggtggtggtgatggtgtggtttgttgatggtagtgtgatggtcttggtgctggtgatgatggtggtgctggtggtggtcatagcactggtggtgatggtatggtttgttgatggtagtgtgatggtcttggtggtggtgatactgtggtttgtggatggtagtgtgatggtcttggtggtgatggtgtggtttgttgatggtagtgtgatggtcttggtgctggtggtgatggtggagtggtggtggtgatgaaggtggtactggtggcaaatgtgctcaagatggtgatggtgttgctgatgttggtgattgtgtgggtgtggtggtggtgccaatgccagtggtggcatttttgcattgatagtggtagtagtggtggtgatgtgctttgaaaggagcataggacccctgagaccggccacaaaagtgcctggaattctgctgtgtgggatgtgagtgttgttgggaaagatcccaggggaaggagggcaagaggagccggagccatcttcttggagaaagccaggctctggccaggcctgggaagggagacagcaagacagtttcctcaagttagagaaatggaaatggcacagaagtggggcaggggaacctgcagcagggactgagagggacatggtgaggaggctgaggtggaggcgtgggcttgggacattctgatgctggaagggctcttactccaggcggagttcaggtcacccatggggaaaggctagtctggggccatgatgcatcttactgagcattctcccccatggcatatggttggagtggttccctcctgtggatccttctgtgtggctgctcccgtttttcccatctgtctcagcacagacccccaggcaagccctggaaggtgggtgctcacattcccatgctacaggtgagggacaaagttcagagacacaggtgaatggccggtggccaagatcattggcaccgggaggcactacctacaccacctctcctctctagcacttccctgtggcaaatgccctgatctgacagccttcctaggtggttctgacactgatgggcacagttcctgagtcaaaagcctgctttgcaattctttggggccaactctttcatcccaaccagtgagcgctagttaggcaagctggaaagctgtaggatgatcaaaatatgaacgtgcacccaccaccaacacgtgagggcggctgctgtccttcaagtctgcgttgccaaggtaactggggatttggaagggacagccaagtgacatattctgcaagcagggctcggcaattattgaagagttggcggctcaatctaaaacggaggagccttgaagtttgcagaagtggaatagaggcatggggggctctggtgaggggcagtggccgtgttgcactttgtcacagcatcatttaggtgacacagcccgggactcctgggccctgacgaatccaaagggtccccattccatgtctaagtgcccatcggacggttgagttgtgtggtccagggctctgccggccccgcctcctggttgccccatttccttcatcctctctccacctccctggtgcctttcctgagtgtaaaaccctccagcaccaagacatccccatgtgcacttgtataaagaggaggctgtggttacggtgaccttcaaatgtccttgttaaatgaaacaaaaccattgcatggtgcttttctgtagtcaacgagtcgctttagctttcaaacaactgtagtgtctttaactttatctgaagaacgtgaaccagatccccagaaagaacatccctttcaaaaccagaagtcttaggctgttaatgtgccataaccactggctccaagcaattcttcagtgctgtgtaaagggtacattccatctgttccccatctggactccttaggtcggtccactggcctgtgccttgtccttagaaggctggaggcctgtcctctgtagcagaagggagatcaatgcagccctgccaattagcggggaattagctcacacatcccttcatgtgccgtgatgttgactcacgtgatctggataaatgacttaggaaaaatggttctaaagatttcactgggaggctgggtgtggtggctcacacctgtaattccaacactttgagaggccgaggtgggcgatcgcttgagcccaggacttcaagaccagcctagacaacatggcaagacccccatctctctaaaaaatacaaatataagctgggcatggtggtgcacgcctgtagtcccagctactcagcaggctgaggtgggagggctgcttgagcccacgaggttgagtctgcagtgagccatgatcattgccactgcacggcagccagagggagaaagcaaaactctctgttaaaagaaaaaaaaatttattgggatatagttttcttccctttaaaactttgaaattatagtgtgtgaggttcctggggctgctgtggtcaccaattagcacaaggtgggtggcttagaacaacagaaatgtgttgtctcacagttctggaaatctgaaatctaaaatcaaggtgtgggcaggaccatgcttgctccctccctgggtttctccagctcctgctggctccggctttccttggcttgtgaccacatcactctagtctctgtctctgtcttcccgcggccttctcctctcatctgtgtgtccctcactttgtgtctttcataggaacacctgtcattgggtttagggcccaatcagataatccagaatgatgtctttatctcaaaattactaatcacatctgcctgtaaataccatttctccaagtaaaatgacatcataggttctagggattgacaaggatgtattttggccatcagacaactcattccatgtagaaggatgctttagcataatttttagaactttttttggaagtatttctagattcacagggaaattgcaaagatagcccagaaaggtcccttcacttgatgtcccaaaggtagccttcaattaactgtaggatgatgtcatcacaaccaagacattgacattagtccagtccacagatgttaagcatccattttttactgagggctcagctgtaagtcagagagaccctcccttcctcgctgtttgactttaagcaagtttgcaatcattctgagcccaaggtttctgttttccacctatgcaaaagggagcgtgagaatgccgggtagggggttgggaaaattaaatgagattgtatgaatgaaactgggcacgtggcctgcctgacaagtggtaagtgtaattcctcttaacagactaacaccagggtgtgaaaacataatccattccaagatctgctcctcggaagggtctgaggatgagatacagaggatgcacgtggttttggagtgagtgccttggctgtggggtgctgggtctcagtgaggtcttgggaatgctctgctctcacggtcactaacagggcagcagtggcatggagtccccttaattgacagacaaccacgtagagtcatcctgtacttctcgctgtaaataccaagcaggatggaatagttagagccgtgactttcacagttattgaagttaatccaacatccgaatctgtgtagggaagtcctgaaggtcattaagaaaattcagaacctcatcttcccaagccagcggctgcagggaggtggcctgtggggcttttggtctttaaatcctctgcctcacccctattgtccagtataaccatcacactttctgaaatccacaaatggaggggagggaggttactgaaatgcttcatttaaatgcactgattcgacaaagaatttttctaaggagcagtagaaaaatggccaggacattctttcctgttcccacggtttaaccaactctacccaaggctcctgtgctcaactgttctttgtttcaattcccgctgcaagttttagaggtgaagtgtcaactccagggatattaaacaaaaataaaaatgactcaaaaataggtagcattgcttagagcagagacaaatcattcaaagaaaatatcacactatcactggcctttgtttaaagtgaagagttaggcagataaggattgtgtagataattttgttgcagactttttttacaaagactaatttgacattgtcctgggaagctgtccctttgaatattcaacaaaagcaaggatgcatagggagagatggtgttgagcatattattttgcataatttatgctcagtgacagccactgcctgcttcacttcatcagacatttagggggagactgctcgatgcttcaaatctcattaagctatttattcattgtaatgaatgattttaatgtactgcattaaggttatgccacactgaactgttaaaaaaatccatcttactatacacattttaatgtttgcagctaaattaatacctttatgactgcctcaatggttgaatggacaccatttgcagatgaatcacactctacactcatccccgttttacccagttctgggccatggcctgatagagttgtgatcatctctgtgtatccatatccgtggacagatagatgagtgatcgggtttgtgtgaactctgataattcacaggctttcccttccacggcgctcccaccaacaacaccatcctacaaacccccctgccccctcccacctgttttcacccctccctcgatccatcaagatgtcagcaagttgcgatgatgagaagataatatctttcgggaggatgaaaggcagttctaataaaaagctgtcattcacaaactcagacccactgtcacacgatatgcattttaaagaccatatgaactgttaaatggctcaatatggcagcccgcatggttgttacaacttggagatctttcatgatgctgaaagagggtgtgggacttattgcagcttcggcaaatgaaaggtttgaggttctacaaagaaatatgtcatctgtgttctgttgcatccgaagtatttctcctgcctctgctcaagatgtcatcagaaatactcacccttagcaggggaagatgtgggaaaatttagatgacataaaaatactggagtatcatcctttataatctagcaaatatttgaaaactacaagctacgcagcgtgacatagtccctgtctgaattcggcagatggaaattcagagtgttattttgcaagggaaggttatctggtcataggatggcacattttaaatttgggagaaggaagagagaccagctcccctagcctgtatggagtagtgatctcgaatgaggctcggggtgcctgcgctccttaatgcgtcttccaaagaagctgtcaagtgtcctgccttgaaaggtcaccaggacgtttgtgattgactcttgataggagttgctgcttatttctgtagatgatatcaccagggcccaatcagggactcaagttctgaaatgtaaggaagaataagttctttgggagaaagtaagtgcagaaaatcatagacagctgttttgggcttgtcttagcctgtgcggaaataattagttcattgcacataacctagcagtttacgattaacaaaaacatccacttagcaaggagattttttttcagtttttgaagaggataaatgaaccaaggaaagaacatgtgaccctttccccatccctgcgtgccttctcccttctcaggatgccttgaagctcaacaaaaactgtacacgctatgatggaacgctgctctaaagccatagggcagtccgcagaatgtccccccttggaagatttgagccaccagttaacccccccacctaaggaatatcaattactcactttcccaccccaatttggcctttgcataatctactaccagagaaacactttgatcacatgacacctttcagaaaactatttaaaaagataactgttggccaggtgtagtggctcacacctgtaatcctagcactttgagaagctgggcgggtggatcacctgagctcaggagttcgaggccagcctggccaacatggtgaaaccccatctctactaaaaatacaaaagattagccaggcatggtggcaggcacctgtaatcccagctacttgggaggctgaggcaggagaattgtttgaacctgggaggcagaagttgcagtgagctgagaccatgccactgcactccagcctggaaaacaagaaaaaaactccatctcaaaaataaaaataaaaataattaaaataaaaagatcactgttctgagcagaaatgtttaatggaaaggatacctgatacctgtggcatcatgtttcatttaactagaggcttaaacgtaaaaataagaaatgagaactataaacaaagcttacttgatgcctattgactgcctggccgcctaatggaatgctcaaatgcagcagctctaacttattatggaaaggtaggtggtgtgaggtagggatcgtttcttcatcaggatgaagagcagagcgagagagccttatgccaagaggaaaggtgggtgaaacacacatggtgaacatgcacatggaagaccctggcatgggggacccctgggagtggacctcccatgagcaggtgttcctggtgtctctgccatgggccctcctgaaaaggcagagtaagtgacaccttctattggcttcccagggctgttgtgacaaattactacaaactaggggacttaaaaccacagggacttatcttttcacagttctggagaccagaagtctgaaatgcaggtgcgagcagggccatgttccccctgaagcttccggggaggcccctgcctcacgtcttccagccttgggcggccatgtcattccaggctttgcctctgtcttcatgtggttctcctcgggtgcacctccatggccttctcccttcttgagaggtcacctatcatcagaaatactcagtgccagggagttagagcccaccctaagtccagaatgatctcatcccaggatccttaatgtcattacatctgcaaagacccatttttccaaataagctcacatttccaggtaactagggttaggatatagacatgtttttttgcagaggggaggacacaagtcaatcggtacacagacaaaaaaaaccaatcactgtgtatcatggtgggggagtgtattagtcacagttctctagagggacagaactaatggaatatatataattcatatatatataatatatatatgaatatatatatgaatatattatatatagaatatatatgaatatattatatatatgaatatatatgaatatattatatatatgaatatatttatgaatatatatgaatatatttatatatgaatatatatgaatatattatatatatgaatatatatgattatatatgaatatatgtgatatatatgaatatatgatatatatgaatatatgtgatatatatgaatatatgtgatatatatgaatatatgtgatatatatgaatatatatggatatatatgaatatatatggatatatatgaatatatgatatatatgaatatatatgatatatatgatatatatcatatatgaatatatattcatatatatgaagatatatatgaatatatatgatatatatgaaatatattatatatgatatatatgaatatgtatgaatatatatgaatatatatgaatatatatgatatatgatatatgatatatatgaatatatatgaatatatgatatatatgatatatatgaatatatgatatatatcatatatgaatatgtatgaatgtatatattatatatgatatatatgaatgtatatgatatatgatatatatgaatgtatatgatatatgatatataaatatatgatatatatgaagatatatgcatatatatgaagatatatatgcatatatatgaagatatatatgcatatatatgaagatatatatgcgtatatatgaagatatatatgcgtatatatgaagatatatatgcgtatatatgaagatatatgaatatgtatgagtttattaagtattaactcacacaatcacgaggtcccacaataggccatctgcaggctgagaagcaaggagagccagttcgagttccaaaactgaagcacctggagtctgatgtttgagagcaggaagcattcagcacgggagaaagatgaaggctgagaggctaggccagtctctctcttcacatttttctgcctgcttatattttagctgtgctggcagctgattaaatggtgcccacccagactgagggtgggtctgcctttcccagcccattgactcaaatgttaatctcctttggtaacaccctcacagacatacccaggatcagtactttgtatccttcaatccaactaggttgacacccagtattaaccatcacaggtggggatattgggaatcacaccaggaggaaccatgagtgtagagacagggtctccccacagagcatggaacccaggtcagccccaactgagactagcaccaatgggggtgctaaagatctggcctcttactcaggccctggcaggatagagaaggccgtgcttccacagcgtggtctggcatttactgtgctgctgtccatctggaagctggtgacctggatgtgtggtttgtcctgcaaaccagtcttttctgaacatctgccccaatgtctcagcacttctcatcccaccctctgcgtcttctacccttttctttctaatcccttagtctctctctaccacattctaaacagtttcttctgacttgccttccaattcaccaattctctcatcagcaatgtcagctcagctactaatcctacccattaagttttaaattataaattctctatttttcacttctgggggttctctttcattaattttcagcttctttttttatacttttctgttctttgaagttattttctaggtcattaaacaaatctctttaaacataataagcataggtatttcagactctaagtctgatccctctcagtcctgatgtttgcagttctgattctattgtctgaggtttctacttgttctagctcatagtgtaatcatatctaactctgagctactcgtttgccatgggatatcactggtgagaatcttcctacgatgaggatgtgtgtctccagggaggttttgcattagcgattgccaagccctaggggcgttttcagtttggaactgctttaaactgagtttgaacttggggttctaccggcaccaactaggtgtggtgaatgtggcctccatcctctccgaacagtactcctaccctctgctccactgagccaccttccctaaagcctctggaagtggcaggaggagggactagggtttaaccttatacggaggatgtgcactttgaagtggcagcgttctgcgatctgtctcctacaagaccatccacctggatgggccccaggctttgtcttctttccccacaaccaaccccttcccttcccttccaagaccatgagatgaacgctcagatcaggaggttggcaaatcccctggacaagaacagctgaattcattgtgccactgacgaaatccccgccgccccccgcccccttggattgtggtctcaagaattcttgaacgcttcctgtctgttcagctcatcttagccttaatgcagcatgtccagctgtccctgcctgcgttggttcaaatttctgccctaccatattgccaaacgcgtgactagcctcctctgcagggactggttcctgctctcctgcctcctctcccgttatcttctgttgctgtccacgctgtatccaggctggctgtagcttctccacacgccaggttcccaggctcaggatcgtcacagatgccttttccaccaacgggaatcaccatcttctcttcgtgggagaagccgtactcccctcctgcccacctttaaactttaacgtaggtgtcatttactcaaagagcccccgagtgcccaggcctcctgttcaccttgatctctgcacttggcatttgctatgtagattgcagctgcggttcatgcatcatgtgggtaaggatttaatgcctggcaccagactggagctgagctgcaggaggtcaggagccacagttgtcctagcgcctggggacgctcatggatgtttctcccgtggctctgtgctcagctatgcagctgtcggccaggagcagaccccctaccttgaagcctgagctgtctgagtagtgacaagggtgtgtaggggtgaagttgacccctgtctcattgttcgcctttcctggaagaatagaccacgtaccactgctgttcgttgttggggaggtcttcagcccctgtgggtgctgagccacagtcgtgctgtgcctggcctcacagctcctggaaggaacaaaacctctcggtctcctccaaaggcatggcctccctgatgctgacagtgctgcccaggatgacacccacccatccatgacaccctcctccagacaggagacattggataagtggattctcacctcccagccacctctctctctaggtcaacttcttactcaccagtggttccactctgccttcccccagccttccctgcggaagccctggcatgcactgaacccgtactgtaagctctttccttctggtggaatgatgcggggggcctggccttgaggtctttgatgggaagatggaggcggtttggcaccatgaggttagagaggctgggttacctggctctgcccttcctagagaactgcacatggattcttttatctctgaaatgtgttatgttcccctgggggtgacggtgtcttctcatcggattgtttcagggttaagcaggagagtattgccaagcactcatcactgtgcctagcacaccgtcaggtaaaccattgctgtcctcgatattttgtgccttcaggaaacagagagaggtgaccctgcaggttccaaaggtgcttcctgagagaggtcaaagttggacctgaagggtgaggcagatgttccccggagcccggggggaggaggcgtcaggaccggccccaagaccacactccgggtcaatacatgtagatatgtaagctgcccatgggaggaactcccgcgagttctgttaccaattttccacgtctctgagatgagtttacattactgggttggattctttttatattttgcaattttgtttaaaaattataaaaataaaatatattcacaattaaaagaaaggaaaatcctgcagttcaggatgctggaaggtaaaagatactcacctcttctctaacccccctaatatgacacacacacacacagacacacacacacaaacccacacacagatccatatatacatgcagacagccacacaaacacacagaggcacacatacagccacacaaacacaaacacacagccacacaaacatacacatacatatacacacagccacacaaacacacacagaggcacacatacagctgcacaaacacaaacacacagccacacaaacatacacatacatatacacagctacacaaacacacagagacacacagccacacaaacagagaaacacacagccacacaaatatatacatacatatacacacacagccacacaaatatacacagaggcacacatatagccacacaaacagaaacacacagccacacaaacatacacacagacacatacagagacatagacacacgcacatttggccacacaaacacacacagacaaaaagatacacacagacacacaaacacatcccgatgtcctgtttgagtctgtgctcaggtacgtaattaatcatcacagtggctcgtggctcaatcttgtcattggtccacgcaagcctctattttataaatgtgtttttaatcactccacggtgaagcttttccgcagtgagagcaccagacaagcccgcaccggcccgtggccctgccccttccttcccactccttcccggccccacccccctctggccccgccccaggtctccactgccgcccagatccactgtctctgttccctgctttgctttctaatgcagtttcatcacatctgtgtgtttagctaaaaggtatctctatttttggtttgggttgtttaaattgtaataaatgggtgtctataatttgggggcacttaacagttttgcattcaatgttgataagatttataaagcaaacattttggccaccatatggtataccactgtttgaactccacagtttaccatcctgcagggtggagacggcagggctggctgtttctttgcagttagaatgtgcgtggtccacatttctgcaggctcacaggcaagggctgtgcagctgtcggccgggagcagagccctgccttgaagcttgagctgtcggagtggtggtgggtgggggtaggggggtgtggggttgacccccgtctcacttttcgcctttcctggaagagtagaccacataccactgcccttcatcggctccaaagtggggtcccaatttctgcccctacagcccctacagctgcactgtgcggcgagccacttcctgtcccagaagtggtctcatgtcatacttggaagcctgagccctcgaaggggtgcaggatgataccgtgacccttctccgatttgcatcttcctgatagcacattaggtttaacatcccctcataggctccactggccgtgagtgttgcctgtgacatgcccattcataccttctgcccatgcttctattctgtcgttagcgtttttaaaacaactcgggggtactctgtattgtgctacagcttgatttttaaagctagcacagacagcagggggatgctggctacatgtgtatggtttgtgtatacatgtgtatgcgtgcgcaaatacatgagttacatttttatcgtgtgcttttttcatttaacaacatctcttagagctgtttcatgaaaacaaagtacatctaaaacgtaacttcaattatgccgttgtgtgagcataatatactatatttaagcccttatattctgtttcgatttttttacattgtaaactgctttgtgataaacagccttgaagtccaatcttttcacatttgaatttttctctccttaggagatattttaagtaagagaagcatggagtcaaaggacatattttaaaagcttccttttatgtatggctaaactgatcaaggttttttgctggtgtttgtttttgttttctgagaatgcaaacggctagaggctgttctgccagtgggctgaagtccgtcagcccacagtccccaggcccagccatggctgtgcacctgtgtgcactcggaggggcagggaggggtgggggtgcaggctctgcctcctcttgctcttgggcggctcgttcctggcttttccgccttgaccatgtggcggcctgtctcagatgttctttatcttatcacatggcatgtccatgtgccgctgggcatttctggcacttcgcacagctcctaaacatctgtttgtccctgtggttacacatatcgcccccttgtaaaagtgagcatgtctttctggtccactacagtatttctcatacctaattccaatgcctggcacacagtaggtgctttagatatttgttgattggatttgacaaatccaatgtatgatttgatttgtatgattgaatttgaatgtatgattggatttgacaaaggatagagaaaagactgggagaacgcctcccagcgtcttcattgttgttctatagatcgacgcttctcaactgggccaggaacacacggcgatgtctggaggcatttttcgttgtcacatcagggggtgagaacaattggcacctggtgggtgggggctgggggtgctgcggaacatcctgctgtgcaaagggcagaccccacaacaaaggatcctccccaaagtgcccatagcaccatgtctgggaaaccccgattgacatcgtgcagtcatagggtgcccatagtgccgtgtctgggaaaccccgattgagatcgtgcggtcatagggtgcccatagcaccatgtctaggaaaccccgattgggttcgtgcggtcatagggtgtccatagtgccgtgtctgggaaaccctaaatgagatcatgcagtcatagggtgcccatagcaccatgtctgggagaccccgattgagatcgtgcagtcatagggtgcccatagtgccacgtctgggaaaccccagttgagatcgtatggtcatagggtgcccatagtgccatgtctaggaaaccccaattgggttcatgcggtcataaggtgcccatagtgccgtgtctgggaaaccccgattgagatcgtgcggtcatagggtgcccatagcaccatgtctaggaaaccccaattgggttcgtgcggtcatagggtgcccatagtgccgtgtctgggaaaccccgattgagatcgtgcagtcatagggtgcccatagcaccatgtctaggaaaccccgattgggttcgtacagtcataggttgcccatagtgccgtgtctgggaaaccccgattgagatcgtgcggtcatagggtgcccatagcaccatgtctaggaaaccccgattgggttcgtacagtcatagggtgcccatagtgccgtgtctgggaaaccccaattgagatcgtacggtcatagggtgcccatagcgccatgtctaggaaaccccgattgggttcgtgcggtcatagggtgcccatagtgccgtgtctgggaaaccccaattgagatcgtacggtcatagggtgcccatagtgccgtgtctgggaaaccccgattgagatcgtgcggtcatagggtgcccatagcaccgtgtctgggagaccccgattgagatcgtgcagtcatagggtgcccatagtgccgtgtctgggaaaccctaaatgagatcgtgcagtcatagggtgcccatagtgcggtgtctgggagaccccgattgagatcatgaggtcatagggtgcccatagcaccatgtctgggaaaccctgaatgagatcatgcggtcataggtaattttctcctttttctttgtattggctttccaaattctctgaaataattttgtagttaaaaaattacttattaaagagatattcttcactaatacaagctggggaagaggaggcagtgccgcagtggggggtagcctgaccacagcacactgctcctgtctgcttctttttgtcctgcatggggaattttggggtgccaggttgaaggtctgcacgcagcctcaggcctcagagcacttggacatttgttctagaaaacacccccaagatgtgcccactctgtggtttgccaagtaagtgagcccaggaacgcaataatttactcaagtggacagaattagtgccatttagggagaggggctgagtgctgtattgaggggcctggaagccgtcggggctgggctgggtccggacttgctaaacctatctgatctgacacttgcgtcaggagaaaggtggggggcagctggtttttgtgggtgacctgctagccagggcacttcctgcggtagatgagaatgtccaccacctgcgccctccgaaccgctttattggactaagggacatcgccagggctagacacatgccccaccactctgcacgtgtggcgtaaggggctcagcaattgtctaaacagaggaggctccttcttagacagcaaagctgtgtgttttgtatctgttggtctcatttcctgtgggatgtttcctggttgcagcatgtctgtgcttggttagtaagacagttggtccaaagctcttcttctctcccgtggggaatgtgagcagaacgatccttaggtagaaaagcggagaaccagtgcttctgcttcttttgcgtaggtggacaagaaataacagtgggaggatattgtctgtccctaattacctgccctgcatccaatttgctggtgtcaggcagctttcctgaggcaagcccttgggtacactgagacgctaggagggacagcagctccggggcctgcagggctctgggatttttttctgccaggtacacttccccctgcctgcattgtgcagaaaggcaaagatgagcaattgggagaaagacagccccagtgactcagcatggagatattatgggataggggagagctggctacttctcaacccttcccccgcctcgcttgccgtgggtttcagcatcgcgggggctgtggagaaaggcctagagagctttgcaggaccaagtggtggtcgggcagcccgtgctgcaggaggtgaacccgggcatgtgacacggtcacagggactcctccagtggtttaacgtgcagtgtgagtggccttaacacgggacccggacatgctgcctctgggctggggagggacaggaacccgaggcagatccttccaccaaacgagtgttttgctgtcaggacgcagcctccctggaagcagaggctcccctgcgattccgctcggagtcccacgctgctcagtatgcatgatcacagggcgccaccgggatggaacgcacggcgccccgacgtgattttccagagaactgagttccttgaatattaaaattaaccttttttaataacagaaatgatatagtccattgaagtagggctggatttatcttatgacagtgcttgtcatggccttgagtatttattgagtagtttcaaaagttcattaaactcaagagattaaatattgccctgagcagtgccccataaaggggaaatatggtcctattacttggtaaaatgttgtgctatgttgttaattcaactcccttgggttctcatcttctgattcaaaagacattttcccgtgctgttaaatttgaaccttggactgtttctcacagtattcatcagaaactcggtattgcacatttatttcctagcggggtagaaacactggccccccacggtgctctagaaatgtcagatgcattcgtcttccattagcccctccaccatcccctgtgtcactgcactaagtaaagccagtggattgacataaagtctcccgatcagggaaggaggtgcagatactcaccccgatacccaccaagggcagccgagcctcctgcttgagcacatgccttgtcgctcagggcttgacgggatagaaaacgtgaggacagagcagctgcggggcccctcggtgatcagggccgtttattttcctcctaatttcttactgaattgattcccactgaatctctgtagaaatatcctctttattatctcatctgacctgagggccttcatttggtttatacagagcagtcttggtgacattgacaacactgtttaatcggtcctcgcgggagcttccctgggggtgcaggacccagtgttccctccaacaagaggccatctcacgggcgagcccacacacctggagagaaacagaaggcccagcatccggtcttccagtggtgtgggggacagcagccggggggggccggggtcttccttacctcctagcttgtgtatggatcaacaaccaccagcccctctgatgtcgaggacccccagggattggcaaaattaaacctggatgctttgatcgctggcagtaagcgacacgctgaaccacaactttctttccagagtaattctgaatgacagcccagagtggggtctttatggagcaggatcctcacgtagcccacattcgccacagccacttggctgaaccctattctaggtgttggcaaggtaggtgttgagtaacagagacccaaagcatagtggttgcagcgaggatcatcgaagtagacctggctgggtgagagtcactgcagcccctcacgcctctgttgtgtcaggacaagatatgtagctggcagggttctcatgaggattacacgagtcctggagaccgtgcagtgaactcttacaccccagggctcagtgtgtgagagctactgccaccttcaccaccaagacagttgcaccatgggcttctcctcttctgtaaaatgggtctgtaacgcccctggaaaagagtgtgcacttaatgttaccattaacatcatcataatgactgccccatattctattataccaatgtaatctaataacattgctctatctgcatagatcacagaagacgtataatacaaatacttatataaatcattgcattgttattattcatcgagaactatgctgtgtgttttgaaatgtgagagcaggaaggaggccaccctcagctttggaggatttgtaggtgatgttggttcgtgtctcaggttcagccagtcattcctggggaacattttcctctctaaccacagccccagccctttgacctcagtccccaccgatctcagaggtgccccttctcctggacatcttcatttccacccgggaaggcatcactccagcatctcctgccatccaggactctcccgcccctgcctgtccctctcgggcagaacccacctctcagccccagcgaccagcggcaggtgagcagcagcagcaacccagtcctgagaactgcttcgtttgtaaagaaagtcggttgttcccatcttcctggaaagatgtgtatttcttaaactctttcctgtttccactttgatagagacatagagatacaaaagtgagaatgtccgtttctctggcaaggacagtaagaagtaggtgacaggtagcacttgtccttaggctgggccgaagagagcaccagggcggggtgaggactgcggccaggggacagctgagcaccatctgagcagtcagggggcagataagtgccatctgagcagacaggcagcctttcccagtgggtgttggagccagaactgctgcctcctcttccagcctctcaaaaggagccagcaaatccatatttttaggtgaaattatttaatttttaaatgttggaaacttcgtactttcaaaaaaacataaaacactctacgagcccaacagaaggcacctgtcgtttggaagcagtccatggccatggggctgtgagccctcacaaccctgcccctgtcacccccaccccgcccagcagtgattctgaggccccaaggtccatcctggaaaagcgctccctgagctggggcacctgtctggacccccacctgtggctcctaggctggaggttagagtctcctgggagaactggaaatggtaaccttgaaatttgaagccactctcctcctgggaggacaggacactgggcaggacgggccttgggaagtcccaggggggagatgcaccttcagcctctcttgctcctgcctgtcctaatcctgaaatttcactttgtcaaaagaaaaaatgctgaggaactcatccagagaaaaatattttagtcttgtaactccaaaatatagacatttgttattttataaattatatatgggaactcctgtactactgttatttagtaaaaacattcaacataaattgacatgttaaagttgcaaaaataaatttgtattaattattaacagcagaagaacctttttgctcatatatgacatatatacatgcatatatatggcattaatacgtacatggcattattaataacgtatatgatataccatgacataacatatgcatagtattatcaataatgttactagccaggcatggtggttcacacatgtaatcccagcactttgggagggtaaggcaggaggatctcttgagcacaggactttgagaccagcctgggcaacatggtgagaccccatctctacaaaaatcacaagcattagttgggcatggtggttcgtgcctataggcccagctactccaggggctgaggtgggaggatcacttgagcccaggaagtcaagactgcagtgagccaagatggcgtcaccgcattccagcccgggaaacagggagactctgtttcaaataaaaaatgttgctagtattctaaacacttaggttttaaagggcttgctagctttgctatcggggtattatctgaaggcacgaaaactcttaggggagtgtcctgcttaatgatagccagcattgatccatatttcatagtcttattaattggagatgtttgggatgatttcatcaatttaattagatcttcacttgtctttacccctaatgtggctgacagatagcttggattaggactggatgtggggccgccaaatttgtttgagtaaataatacataagttttattggcgctcaggcccatccgtcgtgccgtctttgactcttatgctatgacagcagcagcgtcgagtagttgctgcagagaccgtatagccctgaaagcctaaaatattatagttaccaggtggccttttgcagaaaaagtggttattcccaaactcaggtcggggtggagggtgagggccacatcctggtaccatcctggctacatcggaatttccagggcccttgaagaccgaggtcgaggccccttccttggagacctagcaggcagggagcctgggactgtgtatggaactgagcctctggggccatcatggagctcggcaagaggctcaggaggatctggaaagcacgtggacttcccaggatgctggcagcgtccggtgtttctcaaattgcgttctgcgcatagaccacctggggtgctgccccctcacagcacaggttcctgccctcacctggccatggaactactgagtaacctgtttccctgagcatctctgtgcctaggactggccacggggagcatcctgagaccagcagacctggcccggcttccttggcctggcaactccacttgctgtgcagacttcctcctcctgtctccagcgtctccacgtttctcggctcacagttctggggccctgcggaggccccgaaggggtagcttcttcctccgttcaatcagtcgccataggcacagtgacccatcactagcctaggagggagatgccgggggctggaagccctggggtggggagggatgccccagggctctagtggttttcatgatacactttttaatactacttaaatctttcaactatgtaaacagtatcttgataaaaatactgttttgtttttgagacagtctcactttgtcaccctggctggagtgcagtgacataataacagctcactgcagcttcgacttcccaggcccaagcaattctcccacctcagcccccgcaagtagctgggattacaggtgcgccaccacacccggctaattttttgtattttttgtaatacggggttttgccgtgttgcccagactggtctcaaattgctgagcttgggcaatccacccgcttcagcctcccaaagtgctgggattacaggtgtgcaccaccgcaactggccttcataaaaatatttatttaaatgaggaaaaaccagaaagtcttgagaagtgaggcctcttctgggtgaagtttcttgcgacgaatggaggaggcaggaagggcagctgcaggagggggtcctggtctttttccccaatggggtggtggccaggtcccgaattcatgttgtgaaacttcacccaactgtgttcacgaccttcaggcttccttgcgcatatcacatgcttcctaaacgcatacttagaaaaatacaggcttttgagggctttcccaacgagacctagaatcaccttgatacgccgtcgagaccgaacttgaaacctgggtcttgttactggaggtagccccatatcgccctttgaattaatactttttgtaaatcctgtcattttcttcagaatggcataatcacattgcattgtattttccccatttcaatggtaatagatataaatgtttaaactgcactatagtttttgttagaaaaagaattccctcctgagcagggtcccctgtcctgtttgtgactgagttatcggtgcaaggtggacatacatgcataccttaggaagtggccactgagtgaatggacacatggattggacaaattaataagattcccatgtgccctgaagtctagaaccatggtactgaaactttagcatgaacgcttggccgtatcgcagctgctatttttttttagcgcatccagtgtacagaagggatatcactggtattttggcctgacctgcccgatggagcaggacaaggctgaccgcatgccgagctgcgtgcctgggaaccacatggcaagcttcacctgcgtgtcctgaaccagccagaagtgtgagcttctttccaccgattcacttgctgtgttcatttgcagacagagacttgtattctcacgttagaattgaatgagcattcaagcgtatcagtcttggttatttatcttggaattgataatgtacctccaaagatttccggctttaaatattgacagaggcctgattctgcattatggtagatttgcattctagatttcttcagcttatgcacggaagggacaatgttcctgagagcactgttaacaacacaaaaggaaaactatttaatgttttttgcgtctatcacctctaagggtggagagagcagggtggatggactctgtgaggcagggctccccagggaagcagaatcatcggatgtgtatacacagaggagatttcttttaaggactaggccccaagggcatggggtctggcaagtctgaaatctgcagagcaggctgatgggtaggaggagaccagggagagcgggtgtggcccttcgagtcccagggagtctcccggcgaaattccctcctcttctagggagccgagtctttcttaaagcctcaactgattggacaaggcgcacccacaccatggagtttcatccacctcactccatgtctacgaactgaattgttaatcccatctaaaaatatcttcaccaccacattcaggctgggtacctaggtctgggtactgtggcctagccaaattcgttaattttgacacatacacaattatgtcttggaggaagattggccttgcgtcagtcattgtgtgtcccctttctcaggccagcaggtgtgactggtgtgcccagagcaggactctcacagtcagaccccggccacagcccagtcctgtaggccctgttgctctcacattttcagattgtgcagcctctggccatggaggtgtgatgctgatgtaggttaaatgctgatgtgggttaaatgtggatgtgggttaaatgctttgtaaagtgaaccccaggtcattatttatactaagtccttaaagcctaggcctaccactcagaaccttaacaattgtttcaggaggaaaaacccacttttttttttttttttttttttttgagacggagtctcactctgtcgcccaggccggactgcggactgcagtggcgcaatctcggctcactgcaagctccgcttcccgggttcacgccattctcctgcctcagcctcccgagtagctgggactacaggcgcccgccaccatgcccggctaattttttgtatttttagtagagacggggtttcaccttgttagccaggatggtctcgatctcctgacctcatgatccacccgcctcagcctcccaaagtgctgggattacaggcgtgagccaccgcgcccggccaaaacccactttttaaaaagattttttattggaaaatttcaaacgtacccaaaggtagagagcatagtatccctgagcccctggctcatctcccagctccctctatgaccaccccaggcctggctcagcctttgcaccccctctgccctccccaaagcctcacctccatcatgaggtcctatccggttggtctatggtgtgtgccgggcctcgctgcaggacttggcaaattggccactcacgtccacctgcccatccatcacccacgaagcacttggcctctccagttccctttcagtgttttttcaacctgcctcttttttagttcctgctcacatgtgtgatgctgggctcaggagatcctgaggggaggaactcagagcctgccctgcaggggctcggggacaatggtgccttccccggcagggtctgaggggctcagcacaggttgcccactgcaagcccagtggttctcacgcactcctgctctaggcaaccaaccccctggacagctgctttggtgaccagtggtagggggaatagctggatgggcccatttttaccaggatccctcctgtcatttttcaaaccagtcccccttacagctgggcagcacgttttgggacaactctcccacaagtgggctgtggcctggccctaactgtagagaacagccatgcccaggctggcttcaatctgactgtcacagctctgatggcaacacagaggcccccaggtcttcggggggcttctctggagggagttagtgcctcccaatctgcagaaactcctggagacctgaatgtttcgtctgtcaaaagatgatgctctacaatcagagctttcctgtgatcaacaggacctctcaggagttatagttattggaaactgaagtattcactggaaggaaggaaaggaaggaaccctttagggctgatctgaggtggaaagtgatgctgcactgggggtagctttgctgcatcagagttcagggaagaggacccagtcctccttgcagcctagatgatccccggaaaccctagttctgctttgataagagacatcccctaaatctcaggactactgtcaaaggtttatttcttgctcattctgtatgttcccatgaatctgtagggactctgctccatatggtcacgcatggatccagtctccaccgtctcatctctgcaccatcgggaacacataggctccttagtcactgctgtgggatgagccccctgggagcagtcctggccttgggggtggggatgcgagaagcttctctgggtcccttggtgggacaacaagggctcctggctgcagcaccagagggcttcggggccggcctggccccacctccgctggtaccatcacctccttgttgttctggcctttctatttccaccggccctgcccccttccagagcctcatcctttcatctgcaccttgtgagctcctaactactttctaagttgacgtccctttgccactgtagtcattctttctctgtattctgctttcttcagatcttctttcacagtcgccagcatgcagatgcaaccctgtcatcttccacccatttcacacctggccctccagacaagtccagagctcctagcacggtccctagaccctgtttctgggccatgcaggcctctccagcctcatgctcatcactgggcagacgtactgtccttggcagactctgaagtgacaacctttaggaggcagggcctacccactgtcacccagataaacctgaagcctcttcccatgcaacctgtacttttcactccaaatttcaaaaatgcaattgtaaacctgctccaccaataagtagcccatgggtctttgagaaggaaggatctgtatcttttggttctgtgcctggtacattgcaggcttcagtccctgttgtgcgttgaactatgcagaaatcatccatgccatttttttgtcagacaaaaagaacagggtcagaatctcacgattgcaccccaccctaccatggggctgtcatgaatgttgtgtggcatcttttttgtttgaaatgagagaaacgtaactcgtgctcgtgcagccaagaggggcatgggcttcttcacataacctgaagcgcaaggacagcctggcttcaggtgtggctggatccaggttttcaaatgtccgatctcttgaacacagtttcttcatatggtgggcactgtgacatatcatgacctcttagactgccagcctcttctcataactgtgataggaatgtcactctgtctggtctggtttaggacagaattctacacatctgtagattctttggccagggagtaaatacaatgactaggcctgggttacggacccacagctgaggccccagtgtaagtgaagggtcagccctgcagtcatctgctggaacggaggcccatgaaagaaggagaagggagcccaggggacagaggccacagtcacctgtgacaaaagctgctaggaagaactgaccagctgcacatgcatttaatgatggacttctataaccatcttgttcacaggtgtatcacggaggccagcagtggttgctcagatgttgtttgtggaggctggaaacatccctgggtaacatttgtcccagtcacctagctacacagcacagaatggatttttataataatggatatttgcacagagccgctgtcttaaagcatatacagccatctctcagtatctgtggaggactggctccaggacttccccaggataccaaaatccaaggatgctcaagtccttgatgtaaaatgatgcagtatttgtgtgttacctatgcacatcctcccatgtactttaaatcacctctaggttacttataataccaaatgcaatgtaaatgctatgtaaatagttgttatactgtattgtttatgaaatattgacaagaaaagtctgtacatgttcagtacagatgcagttttgtttgtttgtttgttttgaggcagagtctcactctgtcacccaggctggagtgcagtggtacaattttggctcactgcagcctcctcccgggttcaagcaattctcatacctcagtttcccaagtagctgggactacaggtgcacaccaccatgccctgctaatttttgatttttagtagagatggggtttcatcatgttggccaggccggtctcaaactcttgacctcaggtgatctgcccacctcagcctcccaaagggctgggattacaggcatgagccactgtgcctggcccagatgcagtttttaaaacatattttcaatcagcagtcggttgaatccatggatatggaacccatggatatggagggctgactatctacatagcatcttatctgaaacaggtgttaggccagtttatagatgaagaaacagaatggttaagccacttgtccttttgtcactaggatggagttcattggagaaaatccatttttcctttcttccttatttacagatccacaaatttacataggacaataatccacccaacaaaaaggctgatttcccaggctcccttacagcgaagcatcaccctgtcactaagtgctgaccactgtgattaagtggaaacattttgtgggacttccagaaagttaattttgcaaattttgcaggggtctctcctgcccccattctccctttctcctttttcctgcatggaacacagctgtgatagctggaggtccagcagccaccttggaccatgaggggatcttgaagaggcaagctacacatgtacacagcagaagagcaggaggcgggtcttgatctttgccatcctctttgctactatcatcctcctgcattgccagattttgggcttcacttacaggagcaaatacagccctgtgggtttgagggtgtttccttgtgtgcagttgaacctgcagtccttcatactgagtaacttattttttctggagctgctgagtttgggggcagcggtggtactgagtcccagttgttgctttgcttctcttgggtggtcctcataccctgaggtctacggtcccctctctagagatccggatgttctggagagtggccactttgtgggccctgtctccctggtgtcggtgccataactcaaatcaaatcatcgtggaaaacatgcaggctggattaagagactaggacgggactttttccctgactttgtttctgcctggacctcaggcatgcggcattattctccagaaggccgtgtgctcatgcagggctgtgctcacctcttgtgttcttgggtctgtacttcccctcaggaactccgtgtgtattcctgatttcgcacgggacaattttttttggcacagatagtagacttaaattgtctttatcccaaaacccaaactgagaggggaaatcaacatctttaacatggaatagcttgtcccctttgtctacatacagggagaaaatgtctggcaggacgctgtgtttcaggaaaaagtctgcaaattgcagtgtgtgatctccagctcatgtaaatatctccacatgttattcttaattaattatattttattgaagtaattaggtaactgacaacctcagttaagtcctaatgaaaggaccatgtcttttcacatgccgttgatcagaaagtacagcttggactcccaggagctgggcactgggcaaggagacactgggcaggtgcagctgagctggtgcagctgagctgctacagccaggcgggtacaggggtcctgggccaggactcccaccaccacctgtcccagggcacatttcttctccttgctaaggacaagatgcttctgcagcccccgcccccttcctctgcttgttcctgattgttttaatttccaaaaaccatgatgaggacagctgctgaaatcttaaacaatgctgcttctctggaaagttgggttaatttgtttaattttcacacctttcaccctcctccacaatggtagagtgcttttgtgtcaaggcatcaaataaatttcacgcttcttgccttttctgaaatatccggtggcattaaacgcacccagtgcacctggctccggcccgaggcttcgagacttaattgtggttatgacgatctgcaagaggaggcctgattattcccgacgccacttgcattgaggcacagagacaacgtgggcaggggatttgggagaaaattgcattctgttttcttaaggccaaatttcccattaatctgagctgcttcttaaggaaaatgtgaaacatcccgaggcttcagggacttgtgtgagaatatttaggctttttttttttttctttttttcctagggagaacattattaagaaaaagctcaggctgggcgtggtggctcacgcctgtaatcccagcactttaggaggctgaggcaggtgaatcataaggtcaggagatcaagaacatcctggctaacacggtgaaaccccgtctctactaaaaatacaaaaaattagctgggcatggtggcacgtgcctgtagtcccagctattcacgaggctgaggcaggagaaccgcttgaacctgggaggcggaggttgcagtgagctgagatcgcgcccccgcactccagcctgagtacagagtaagattcagtctcaaaaagaaaaagctcccttatttctactggggttatcaataagtgaatctaaatgagtctttgaggctgattttgtttcggggtcccagggagtggatgtggagaggtcctccatcccctcctttcgaccctgcctccctccccgggatgcgctgcgtatctgtgtccctcagcagaagccatggtcatctttttctcccacgcgccgttctcgggcagtgattccgtaatccccctcctgtgaactagtgtgccacttccatactgatcacgctagtagacatatatcctttatcaaacgttctggaaatcactcatcaccatggtgctgatgttttacagtgcggccctttatgattttaggggctgtgagcctctcccgtcctgtaaagtaaagataaaaaccaaagaaactgctcccagagtcagtgtggtacaacgacgcgctgtcaccgcagccccaatccctggtgttcttactattagacgagttgatattctcatgtctgccacagaggggaaaatgaaatctgaggctgaagtagaaatagaacccaagggtctcaactcctgttttaggtcttttttatagtaaatatttagactaggtctggctatatatattatagctatatctatgtatctataattttttttttttttgagacagagtctcactctgtcacccaggctggagtgcagtggcgcaatttcagctcactgcaagctccgcctccctggttcacgccattctcccgagtagctgggactacaggcgcccgccatcacgcccagctaattttttgtatttttagtagagacggggtttcaccgtgttagccaagatggtctcgatctcctgacctcatgatccatccgcctcggcctctcaaagtgctgggattacaggcgtgagccaccgcgcccggcctataatttctataattgatgaacttaatcacgtgagttcctctatagatcataactgtcacttgtcccataaacccagccccttggtgtggatcaaaatcttccacgtctttattgggagcaaagacctcgcacttggcttgcaaggttacaatctctgtcgggatttttcaggatcccgaaagcccaggtaatgcccgtctggtacaccaatacctggtttcaccccagaccaccatctgctctacccggaccaccatctgctctacccggaccaccatctgctctacccggaccaccatctgctctgcccggaccagcatctgctctgcctggaccaccatctgctctgcccggaccaccatctgctctgcctggaccaccatctgccatctgctctgcccggaccactgtctgctctgcccagaccaccatctgctctgcccggaccaccatctgctctccctggaccaccatctgccatctgctctgcctggaccaccatctgccatctgctctgcctggaccaccatctgctctgcctggaccaccatcttctctgcccggaccaccatctgccatctgctctgcctggaccaccatctgctctgcccagaccaccatctgctctgcctggaccaccatctgccatctgttctgcctggaccaccatctgctctgcccggaccaccatctgctctccctggaccaccatctgccatctgctctgcctggaccaccatctgccatctgctctgcccggaccaccatctgctctgcctggaccaccatctgctctgcccagaccaccgtgtgctctgcccagaccaccatctgctctgcccggaccaccatcttctctgcctggaccaccatctgccatctgctctgcccggaccaccatctgctctgcccggaccaccatctgctctgcctggaccaccatctgccatctgctctgcctggacctccgtctgctctgcctggaccaccatctgctcttcttggaccaccatctgctctgcccggaccaccatctgctctgcctggaccaccatctgctctgcccggaccaccatctgctctgcctggatacagcgtcaaataagacagatgtctctactgtccccaccaagcaaagatgtaccacttgcaaggttgctgtgaggtccctgtgaagactcaagagagccaacacaaagcctcctgcaacagttagctgccaaacccaactgctgcttctagaacagtttcccattggttccgtatgtggctgggttctttctcattatgttgacatcgactgaaatgtcaggtccttagagaagccgtgcctgccaccccgggttctgtctcttccttgagcttctcagcacctggcatctagcggttgatgccaccttcacctgttgtcaccgaaccctggggacaggtgtggctgactcgctctccaccgattccaagcacttgcaactctgggatttgttcagacaaatcattgtgggtgaatacgtggctcagaaaggcctaaatggctacaaccactttagaaaagacttcggcagggtcttataagtaaagtgacacacaaacttccctatgaaattgctccagaaattatactcaactgggtattttccccagagaaatgaatgagtctgtcctgataaaacatgtgaaggaatgtgcagataagctgtattctagtagccccatactggacgctgcccaagtgtgcatacctagagggacagatgagaggaccgtggtgcagtcacaggatggaacacagcacggtgatgagtaatgcactgtgcacagtgacatcagtgactgtcatgtcattacattacatggagcgaaggaagccaggcacaaggggagacacactgtgtgatgctgtttccatgaagtccaggaacaggcaacgctaattgtcttagctccctattgctgccataacagaggacgacaatctcagtggcttaagcaacagaagagaattctcttactgaaagccacctgtctaaaatgcagcagcaggtcctgcttttcctgcaggttacagggggaagtctgtttcctcatcttttcagcttttaggagctgccttgccccactccgacctctccatcgtcaagtgtcctctcactaggactgtcccctgcctctctcttataagggtccctgagattacacttcatgctcacccaggcaacccaggatcatctctgcatctcgaactccttaacttcatcatacctgcaaagtctgtaaaagctctggaggttagggcgtgggcatctcaggggagccattgtcttcctgccccaggaacagatggtgatgcggtttaacttggggggtggtgttgcctgggaatggatgaggggagtgttctgggggctggccatgctctagatctggacctcagacttggacacaggcacatgcatgagtaaaagttgaccagaccgtaaccgtagactcagtgcacatcactgtgtgtttgttacacttgggcacaaatctaaaacagaagagaagggtaaagctaccctcctccagatgttgcattgcctgtgtgtagtgcccctgtgctcagagggtgaacaaagcaataaccaggccctgtgttagtgagcgtcatggagacagtgtggggtgcgtggaggtgaggcgtggagcagccagctgccaccacctgtgttttagagccccttcctggttccatttcattttgcatacaacaccatggaatcacatgatggagagtgaagcagcttattttttatatggggcccatgacagcatagtgagtggggcttttacagatgtttatggaagggaagttctttgcgatcctcagtaccccaggccctcagtggtctccaggatcccagccagatggccacggggtcacgggcccactgggactgggtcctacacacacagttgtgggcttttggagacactgactctgcacaggcttctctgcttttcaatgtggcgtttaaggttccggaaactgtgcagtttagaaaactgctgggcaggtttgtcaaaggcaaagcaccctgggcattttcaagatgtttctgtcttcaaagacccagcttgggctggcacagatgccaaggctgcaccggccactccatcacgtggtggggacagctctcacatggctcggcagagtggctgggcgcctcaccatggggagcagtgctcctgaccttgaaccctcccccacgtagtgccagcatcagagccatcaaataaacctcaaagcagctgggactcagagagaacttcactacatccctggaacactctttaaataacttcagactcagcatcaaaaggggttccctccctccccataaggcaataaaatgtgttcttttcagataaatatttcaagaacagaccaactcatctggatcaaatgttacctttttaaagatgcaaattgaaaattaagcatccaacacaaggattccctggagccactgggaagggctgcatgctcatcacacccggggccgcctgggcagtcgggactcaccgtcgccaccgccctgagaggtatcgcactgtgtgcatttcagaatcatttcaaagaggcagtaaggaccccgatgcatgtcctaagcaggcagagccgctgcgtgtgacacaggttggtcgcagaaatcagtctacagagataccggcaacttttcttctacactgcactttcctgcggccctggaatgccatttattttctaatattcccaatttggacatttttaaagagaatcaatcaaagctaccaaagaaatatgacaataggtagctaagaatattcaatgcttcagaagctcatcatcataattaacggttggggggcttatagcagcccaggctttgtgttaagagattgatcaccatcttattccatccttgcccaggcctcctagtcagtgcaacttcaccacttctcccagaggagaactagataactcagaaaagtgaagtggcctgccacagggtgtacagtgcagctcagtgcagagcggggatctgaaccaaccagtctgaatcctgacaacaggctgcttgatcccatgagaattggctcttacactgagatgggacaggctagatgtatggagaagcctggtgacatctgaatgcctttcctatatgttattagggaaaagaagagtaacttgtgttcatctatccatccatccatctacccatctgcccacccatccattcatccactcacacacgaatccatccatccactcacacatccatccttctgttcacctgttcattcctcccgttagtctctccattcttccatctgtccatcatcttccattcctctcactggccaatctatccatccattcatccatctgtcaatcatccatctacacatccatccatcttccattcctcccactggtccatccatccatccatccatccatccatcctctcacttgttagtccattgacctgtccatctgtttatccagtcatccatccattcatccatccatcatcttccattcctctcactggtccatctatccatccattcatccatctgtcaatcatccatctacacatccctccatcttccattcctcccactggtccatccatccatccatccatccatcctctcacttgttagtccattgacctgtccatctgtttatccagtcatccatccattcatccatccatcatcttccattcctctcactggtccatctatccatccattcatccatctgtcagtcatccacccacacatttgtccttccatccatcttccattcctcccactggtctgtccatccatccatccgtccgtccgtccatctatcctctcacctgttagttcactgatctctccatctattcatccagtcatccatccattcatccatctgtccatcatccacccacacatccatccattcatccatctgtccatcatccacccacacatccatccattcatccatctttccattatccacccacacaaccgtccattcatcctcctgtccatcttcctacttgttagcccatctatcatttcatctattcttccagtcattcatccgtctttccttccatccatccatccatccatccatccatccatccatccttgctagattctaggtattccatgaccaacaaggctaatgaggtgcctgctttcacgggtctaatgttcttactgttcattcttcaccaccctgtaccaccatggaaaagggggaactgtgtagtttcctgacaaggccttcattacatccccactgagcatccacctctgggttcatctagtatgactctgctttcaaaactgcctcagtcactccctcatgcaaggaaaagccgcattcattgatgtaaagactgtgcctagataattgccttggcagaacctcaagccaaactctctcatcttttttattttagttttcaaatgggcagccttcccacagggtcaaaacggcccagcttcaacctgggggctcagctgctggctgggctgggcacgtggtgctgtctgcttcagggatgccaccagcagcaacattcaaacatggcctgccatatgctccatgtctacgttgaacagctcattttgttcagctctctctgatgcagagcaggatttgagctcaaaaaaatcaaaatgaaatgagcagtgcctgctgggcctggatgggaagtagtgtgggaggttgggggtgtgtctgggcagggatatgtcagcactgtgggccgatcagagtgggcagctggccggcatgggcacagtgcacagaagcctccagccaggccccgatcagtgcccacaggcagtggggctgccctgtatccactccttagcatggcccaacaggggactgggtgaggccagagagaccaaggcctgatttcagcagggtgactgtgggcactggtcatgcagagctgctgcctcatccagaaggacaccctgcccttgagccaggatcaaggccgactctggatgggcagagccaaggaaggaggcctcttggtcactgatatgaccaaccctcctctgcaggcaccagccagtttctgttctgtggctgccccttgcctggttcttacccagatcatggtgggtagagcagggcctctgcccttcagtctagtctgtgctaacagaccaaagtgaacttcagcaaacactctagcaagaaactctgggtccgtagcatgagcccatgatggctggagctggctctcattgactccccagagccgtctgtgcagtccctccctgaccatggtgagcaagggcatgttggtagcttggaactggccacggtgggaatatttacatgatggaaattggcaaatgctatagatctgcctcctccccagagtgccggaggttacatttatcagcaccccactggtttgatgccctaaagtctgaattcctcagcatagcattcaaggtccctcctggttttcttatccaactcacaatggctacagagaaacagagaggtggaggagggatttcttggctcttataatttaatttctaggacatcctgagacatagttagatcctagggtgctaactgtgtgctcaagatgggcccagccccaccttccagctctgccttctccacgtggtggtctctgccagctccaggtcgactttattcgtggagttccccagaagctttgggactgcatctctccggcctcatggacatcttgtttttccttcgaaccagtccaatgaaatggaatgttctagatggccaggcctggctcatatgatcgccctttaagcaggaggggcagagtcagccccactaaaccccagggtcaagccctgggaacgggaagagtgtttctccagggagaccctgaggggctgtttccagaggaaggagccaggctgtgttgatagaaccctgcctaggctttgcttctgtcctctgcctctgcgaaatagtccatcccccaagccactcctcctttccatgttccaggctcttggtgtggggggccacctccctgcaaacacccttcccggtctttgcatggttttaaatcatccttcatggcacccaaggccccccttcccatcccagcctcagatctggaagctcccctccccattcgcagagcttccccgccccccacccctggcccatgctccctttccctgcctgggtggcctccttgcctttcaccgctggcctggaagtgctttccagctggttgtgtttctctttgtacctcccacagcttccagcatggcttttggcttttgtcctggcagtcaggaccctagtggaggggaggggtgtgtcaccagcttgccctgttccaaggctgcgtgagtggttgtggagccgggcttctcctcaccttccaagtcaaccactgcctagctggtgacctgagtctgtaacaagcccccctgagcctcagtctcctcatctgtaaactggggaggtggtgggactgctgcacgggatggcatgctgtgtgtcttgtgcctaacacacccccgcacaactgccacgccctgtgcgatggctgttaccgccattattgtgtgattcctgcctggccatggcctggcgctggcggttggatgggccttgcacatagtagatgctcagatattcaccatggagtcccctcctgccagaacttctctcccactggttctcaaggacagtcacttacaaaagcaatttcttggtggccacagatcttcagggtcatcccctgtggccagctctcattccccaagggcagcacttagtagggccttttcagcagcctccctatctccatcgtgacaaagacccacaggctgggcagcttcaacatggctcattttcttaccattctggcagctggaagtccaagtccacggtgtctgcagggctggtttctcctgaggcttctctccttggcttgtggatgccatctccaccctgtgacctcccaaggttgtgcctctgtgtgtgtcactgtccaaatttcctctccttaagaggacatcagtcccactacattaggagccaccccagtgaccccatttcacctccattagctccttaaaggcgctaccgcaaatacagtcacgttctgtgctgctgggggttaagactcagcatatgaatcttggggaatgcaggttagccggcttgatgtcccatgtaacgtgggtttcccagcgtgaatgacccatctcactggagtgggcagggcatggcccatgcctggctcagccctgatgcctgcaggaagtgggtgtcattggtagaggaatcagaggaatggactcccctgcatttgggccactgagtcctctgctgctttcactgtggtgtgaggtgacttggaaaggagagtggagtcagggagagccctgcgtggaggccattctgagacaggcaggcaccccagccctctccagctggcttgctacaaatgcttgccgaccagctcccggcaaagctgactcctggcattatcacatgattcaactgttctctgtgcggcaatattaataatgctcactattgttgcaagcacagcaggaagcggccgtgtgatggggtggtggaggggggcattgctataaacaggggcttgctggcagagagctcatcctgtccttagggcagaaattaatgtcacctctcagaatcagaattccgattagagctgcactcaggaagtccctccagatgggagaggacattgtctgaagtccttagcagagccgagagctgtgtcccttgcagagccagcctgcctcctcccgtggtgagagtggcagctggtctggactcgtcctcttcagtgagatgcctgtgagtgcccaggaggagctgccccatgcatgcagtgggggtgtgcctctccatggaccggaggtcaggaggctgatggatgtcctgcatccctcacggtgactccaaagattcaaccagccggagggaggctgggcttttccgctagctggaaatttcagaacccttggcccacattcgtcaaactgccagctcagaagtgagtggtattcaaattcttttcagtggtggttctccaagtggggtccccacactagtggcatcggcattactttgggagacgttggggactcccattctctgcccccctaccccagacctgccgaagcaggagctcgggttgaagaacctgcctgtaccccagccctgtgctgccttccagtggaaacatggtagagccatggagggattttaaatgtcttagtggccatgttgaaaaaaaagtgaaaagaaacagtaaaactaattcttattgtggtgaatgtatttacaaaatttaaccattttaaccattttttatgtgtacagtcagcggcattaggtacattcacagagtcatggaaaccatggccactgtccatctccagaatttttatatctctccaacctgaaactccatccccattaaacacgcactcccagccgcactctcccccgcccctggcccccaccatcctattgtttatttctatgaatgtgactgccctagggaccccaaacaggtagaatcataccgtatttgtccttttgcatctagctgttttcacttagcatgatgtccttaaagttcacccatgttatagcgagtgtcagaatctcttttttttttagactgagtcttactctgtcacccaggccgaagtgcagtggcacaatctcagctcactaaaacctctgtctcccaggttcaagcaattcttgtgtcttagcctcccgagtagctgggattacaggtgtgcgccaccatgcctggctacttgtcgtatttttagtagagacggggttttgccattttgcccaggttggactcaaacttctggcctcaaatgatccacctgccttggcctcctaaagtgctaggattacaggcgtgagccaccatgcctggcctctccttcctttttttttttttttttccccgaaacagagtcttgctctgtcacccaagctggcacgatctcagctcactgcaacctctgccccctgggtttaagcaattctcctgcctcagccttcctagtagctaggattacagatgtgtgctaccacacctggctaatttttgtatctttagtagagacagggtttcaccatgttggccaggctggtctcgaagtcctgacctcatgatccacccacctcggcctcccaaagtgctgggattacaggcgtgagccaccgggcccagcttctccttcctttttaaggctgcgtaacattccatcatagggtagaccacattctgtttatcccctcattcacgagtgaatgtttggctcattgtttctcacagctgctgcgcaatttacattcccacagcagttcccaaggttccagtttctctgcatcttcaccaatatttgttattttctgtgttttgatagtgaccatcctaatgggtgtgaagtggtatgcaatcagtttcgtgaacgagtttgtttaacctagtattgctggaacagtattatttcagtgtgtaaaaatactcagagtattaatcaggtattttacatggttttaaaatttttattttggaggaagcttttgaaatcggtgtgcattagacactcacaccccagctctgctcagaccagacccattgaaggcacttggcacaggcccgccccttgacgccctgtggacagcatggcgctgggcgagtctccccgcagctccagaaagggacagaggacatagcttaccaagtgtgattttagggcctgcagctctattcattttaatgaagggtatctttttgagggggtgaaatcttcggacagttttgtcctgactcactgcctttggggagaagtggatatctgtgctcagacacagaggctgcacatctcgggggttcttccaattgctggtttgaaatgacttggagtggtggagaggctgagctggggaggtgtttggaaacaccaattcagaacacagcaagactggcgcagcctggcattactgctcaatagaataatatgtggcccgcagagctgactgtgggtgcttgggataaaacccagattctgtggcctatttccttcttcttcagaaaaggactctgttgggggcatgcagtcctggtctccaagagactcactctttctctcttggtcgtgctctctcttccccctccctctcactcttttctcccactctccccctcctccctctctgtctttctccatctccctctccctccctctacctctcttctctctcccctcacccctagcccctctctctcctccctctccctgttaccagcaaacctgctgaggtcacctattccaccttgagccagctgtggggtgtggggcccgagtgccagctgtttcctctaaaaatatcacccacgtgagccagcaccgttgggtccggagttgggagttgggaatcgggccatcggaacatctccccttctgggttgattactgtcaacaactgtcatccctccctggccctgtttctggctggaatgcatttctgtatcgctatctagcagggctgtaaattggcagcgtggattggggagcaaatttctagccgcttccctctcagaacatgcatttctcctgacttgtattactcattttacggctggagacaggtgcacatggcgggaagtgggcacaggagccttgacctgacaaggtcctcgaggccaggcgaggtctcaggaagtctgagtttggaaggcgccgccagagactgcacttcagtgtactgtggtcctgggccaaggggccaggccaggagcagcagggcccttcatgctcagaggcccacttggaagagatggagcctcccatcccttgagttttctgaggggtgcacatgttctgttttagggggatgctgcattcgaggcacagagaagccacctgcttccttagacagatcacaagcagaagtctcacctgcctttgctcttttgctgttaaatggcaaatgctgattaaatggcaaatgctgatcaagaaagtaaaggtgtccattggctttgtgctggccctttggtctcaagagacagagaagacagatgaaagtgaaagatgagtttgcaagcttcagcccaaacttttttcttttttttctttttttttttttttccctgagacagagtctcgctctgtcccccaggctggactgcagtggcaccatctcggctcactgcaagctccgcctcccgggttcacaccattctcctgcctcagcctcctgagtagctgggactacaggctcccgccaccacacctggctaattttttgtattttttagtagagacgggatttcaccatgttagccaggatggtctcgatctcctgacctcatgatctgcccgcctcagcctcccaaagtgctgggattacaggcttgagccaccgcgcctggccaaacttttttgactaagtgaggttattgtgtgagctggttttcctccccaaacctctgatttcctatctatcagatgggctgataatggcacttgctctacagcccagtgaaatcgcgtgtggaggagttagtgtcctggagggtgctgttacaaagcgccgtcagttgggcaacttaagacaacagcagtttattcttttaggggtctggaggccggaagcctgagatggaggtatggacagggctggttccttcaggggctccgagggaggattgcttgagcccaggatgtccaggctgcagtgagctgtgattatatggcagcacccccacacccccgcatccctctcccggcttctggtggctgccagagacagcccttgatgttccttggcttgtggccacatcactccaatctctgccttggccctcataccactttttctgtgtgtctgtgacttctcttgtcattggatttaggacctaccctcatccaggttagcctcagcaaagacgttttttccagataagattgcacacaccgggtccaggtgtacatatctttctgggggccactgttcaaccatgacagtgggtcagtgttttgtccatggagaaaggcctcgcagggtttggtgggactgctggttatgggggtggggctcactgcagacgtgtcctgagcccgagatcactcgttccccgcagcaggtgcagctgagagcagaggcggccgctttgcccagggcggtgcttttggttcttgtctctgctcatcagtttctatcgtaccccgacaaatacatcccctcccatcacggctgtttctggggactataaggatctttctgccactgctaatccttacagcttaggcaagttcgtggtgcctcagagatgaaacctgagagatgtaaaaactcccttccttggaagttctaaaagacacattaggatgaaagagggatttcaaactctacatcctggggtagctttccagtcggctggtgcacagagctaggagaggggatcgtttggcttccaggccagccacagcggagtttccaccaggaaggttctggccctgtctgcctccccagctccctccccaccctcccctcttctgcagtcctagttgcctctctcttcccccaaagccaaggccaccccgctccaggcatggcccatgctgtcccttctgctgagtatacaccccattccctgtgtctggccaattccatctaaccctcaggcctcagcttaagccttccaccccggagaggccatctggacagccccgtggctggcacatccccctgctgtgttctcctaagtacacatgtgtgctccctcacagccatcatcagaattgaaattatacaaacattggcatcattcagtcggtgatcatcctgagggcagcttcatgaaaagcacccagcacacagtaggtgtctgttgaatgcactatttgcaaagcctgtgcattctcattgaattccagccacagccctcttagtgggagttgtaccaagagcatagagaggtgaagggaccccctgatgatgccaggcctgcgaaggggcactaggcactcacctggagagtgactgcaaatctgggctcttacaagtggtctccagccactgtccctcaggagtgtgagcagctgcaggaatcctctgccccgagagcaagcctccctctgcaggcagctcctcctgctgtgcggggaaacgcagggagagggagcgggtcagcaccggggcctggaaagggctgaaagaactggaggagggaccactcaggggtgctccttgctctggaaggcattgatcttgccactaaaggccatggaatgaaagggtgcaggaaggaaagatgccatctccagccagaggcttccaagtgcagtgctcccctccccacagggtccccaggggtgggaagatctcaccacaatttctattgactgtgactttgtcgccactgaaaacaaaataagcaggcccagccattctgggaaaccatgtggcagtgtccagtaaagctgagcgtgtgtatttccagggatccagcaactctcttcctcacaagacctaacagaaacccatgcccaggtgcagccaaagccgtgctctggaaggttcatagcagcactcctcctaacagtccaaagttgggagtgagccaggtgcccatgcacagtgcactagtgaatagggtgtggcatgtcccacaggggaataaggtcaggagtgacccaggtgcccatgcacagagcactggtgaacagagtgtggcatgtcccacgggggatgataggacaggggtggcccaggtgtccacgcacagtgcactggtaaatggagtgtggcatgtcccacgggggacgataggacaggggtgacccaggtatccacacacagtgcactggcaaacagagtgtggcatgttccatgggggatgataggacagtgacggcaaggcctgccagccatgtggatgggtctcagacgtgctgtggaatatgagtggcagcttccatatgttactcatttctatggagctaaagacagggaggggcagctggtccttgcaatgggagcccttacagcccttttccgtggggaccctggctgggaggggacacaaggtaggctcctggggccgatgtcttccccttggctggctggtggctgcatggcagcgtgcatttgtaagagtccctcactcagagtagattctttcctccatgtgcacaacacttcaatttcagaaaagcactgaggggtctttattccattccataacaggaggagatgtcataatcctggacagaatggaagctaccgaaagggactcacgtgaagtgcatagacgtaattttgatcaaaagaagttaggcagaaaaggaagctttctggatgctttcattgataggaaatgcaaaacagtcaaactcatctccgctatccaaagccagggtggaggttgcgtttcaggatggagggtgtttcatggctgaacggaatcaaggggccttctggggtgcagcttgcacagagcccccttgtgaaaatccatgtgcagctctacacttaagatgtgcatgttttctctggagatgttatacttcaaaaaaaaaggaggaactgtgcttccttgacatttatgacacaggtggatgtgagtcttctccccctgccggggttctggtgccgggatgtgaggggcagggcatgtgcagaaagcagtggcccccatcatttgtccagcgctggctgatggaggcccactgggtgtgcactagggtaagtggatttatgaatagtatcgagttctaactcaacccatgctcatggactaaaccaagcagctttaacacagccctgcaaggaaaccgcagcctggagaccttcctcaccacgcaagccttgagcagtgtggggctgacacacattcctcacaggccgcggctatcaccagccacagtcagaggctcaaaaccaaacaaaaacttatgatccgatcacatctggaagatgtcagccccaaacgtgtgaagttaccaagatgactttttgaacgtatatctatgcattccactgcattgtcattaaagacaaatctcactgggcacggtggctcacgcctgtaatcccagcactttgggaggccgaggtgggtggatcacctgaggtcgggagttcatgacccctgactaacatggagaaacctaatctctactaaaaatacaaaattagccaggcgtggtagtgcatgcctgtaatcccagctactcggggggctgaagcaggagaatcgcttgaacccgggtggcagaggttgcagtgagccgagatcgtgctattgcactccagcctgggcaataagagcaaaactccgtctcaaaaaaaaaaaaaaaaaaaaaaaaaaaaaaaaaaaaaaaaaaaccaaatctccccaagtgtcttctttaagtatttatttaccagtggagggttcagagcagcagtaaatacatttataaacatatgaatatttttatactaagggtgcatgccagaaattctcttctctccgtggtgtacatgagcacagagttcagagcgcaaccatgcaggagaacttacggatctggctccgaattctaaattaggacaagatgcaattgctgagcacctcagctgcagaaggggcctcatctggcctcaggaggcttctgagagttcctgttcttggccaccttgcacctgcttgctcagagcttcctgggcatgtgggtgtgtcatgtgtcttgggagaatcacctgattccccttcctgggctcagcagcctcagtgcttctcctgctgctgggaagccccgccctcttgtcaggtgtcaggtgtcaatcaggattccatctgggaaaaaacccatgcgataagggattttttattgggcttaaaaccttacacggtgtgggagaagctgaggaggtaagatttggagaggtcagaaggtcagagaaaagtcgcaaacaggatggctgagtggacgtggtagagaaatgcctggatgctgtggccctgctgcacgtggtgtacctcggggcagggcagagagctggggagggatgctggaagcacaatgggggaagcaaggacccccagacccacgaggatgggacagacccagcatctgccttgcacacatcagtgatgacctgcaagtgaagctggcaggaggtggaggagctgtgggcggtactggtgagcccgcagggcaggcaggtgtcctgagctgttccagtgccccgggtgtgcactcacctcacagatgcagaggccactgcctcatgtttctttctaaatatcatgtccccctcattgccaaccctgacccagacctgtatgggcaagacatgtctttcatcctagctgaattgacacattgcaaaactatcccagagtccaaaacagagactcaatatggtagagacccctatctccatttctttagttctggtgtggttgaatattgcaaacgcactcggatgaacttagcattgacttttggatggcgttttgagaaattgcatttatagcagcaatggcttgggattttttttgttcatgactgtattgcgtcccttcttttacttggcaggtacgttcgtcatttttttttcattttgagatctacacacttaaatcctttgatttctgcatcattaataacacttcctcaggtcctaatgaaaggcgtcttgcctctctcagcatccgagcaagcagttctaagtggatggtcccgtcgcaatcaggccaagcttcttcagtggcttctaaagcctttcctcgcctggcctctggcggcatcctcagcctcataccttgtcactccctgtgcgcacacatgcaggctgtgcacatgctcctgtacacaggcacatgcccacacctacaaatgaacacgtgtgcatgggcatgtgcacacagcacacatatattcacacacacagtatccacacactctcatatccacacactcatatatacatacacatccacacacagcacacacgtatacacacgtatacacacatatacacacatagcacacatgtatccacacacagcacacatgtatacacacatatccacacatatgtatccacacatagcacacatgtatccacacgcatccacacacagcacacatgtatatacacatatccacatgtatccacacacatatatccacacacatccacatacaacacacatgtatccaaacacactcatatccacacacatccacatacaacacacatgtatccaaacacactcatatccacacacatatccacaaacatgtatccacacacatatccacacacagcacacatgtatccacacacagcacacccttatacacatgtatccccatacagcacacatgtatatatgcatatccacacatagcacacacatacatgtgtccacacacagcacacacatattcacagacgcacaggccctgtagaccctccactgcagccactgatgtggtcctcccatggcccttgtctcctcctgggtctctatagaggccactcctaggccagggatgtcccctgtcacccactcttcccctgttttcactctggccagctccagctcatcaccctccagatttcagcttcagtccctctcttttgaccgtgtctccctgactcccattgtttagggagagtgtcatcctgacacaggcctcagtcatccctgtgctgtgggcatttgccccgcctgtttcccatccagtgccccccacagagcaaggcttggaatccacttctggctgtgacagcacagtgccccacatgctcttgaagatgggaaaggcataagcctgtgccgcgtggtccatccggagccaaatttaaaaaactggacccaccacgtgcagctttgtgggcctcacgcagaggaggagcctacagcctcctagccggtgctggctcgtccaggaaaggttgctgagccccagctctgtgccaggcataggtggaccaggagcagcaggtcactgctctggtgaaggatccccaagaccgcctgtgtggctccgcgagcgccttgaatcacagctcaggaccgtgggccccatggtgcagagctgcctgcagagctaggtccagcccggcccagaggcatggccaaccctcaccctgagcagggcgggcaccacagaaggctccgggaacaggagcagggagggaggcggccaggaccggagagcagtggcaccctgaacctggagccaccctcgacactaggacgttcagtgtggaagcgagccggccaagggagagccaggacagaggcagcggtggaggggcgggccttcagggtgggacagctgggactggctcctgtctgaaaggggggctggggaggtgaaggaaaccccatgtctccagcctggacccctgagcaggacgtgggctctgaggtcgagcctaggagaaggacagtgggcagggcagacgctgctgtgattatccgtgagataaggcacagagcacatcccgcaggaggggcagagcccagggaaaacagggcggcagcgcacagaaacccgggtgacggcgcagcctggacaggacattctcgagggccctgcccagggcaggatggccaattgcaggacattctcaaaggccccgcccagggcagaatggccaattgcaggacgttctcgagggccccgcccagggcaggatggccaattgcaggacattctcaaaggccccgcccagggcaggatggccaattgcagtacattctcaaaggccccgcccagggcagaatggccaattgcaggacgttctcgagggccccgcccagggcaggatggccaattgcaggaggtgctgatgtcctcagatcatctgaaaactgaggcatgtgatcttgtgtttcttaagtcagggcagttcacatgcaacaaatagttaccaaggctgacctctctggtgagaccacggggagatttgactccttactaactcattgcagttaaaaaatatattaagaggtattaattttatgaaaaaagcaataaaagaaatagaagaggccagaagagtatgtgatgtattcaatgggggtttctagttgttttgtttctttttcatctgagagttaaaggaatcatctcattttttgacgcagccaggtgctttaatctagctgataaaaattttgcttggaaaaacactctggcttaatatattaaggatgggaaatataggaagatgcaggtacctataatgaataatgctcacacctgaaaaatgccgtgtctaactcataggcactgcattcgggtggctccagtacagcaaggacatcatgtgggtggagggtgtgtggcaagggataggggtgtcctgtgtggagggctgtaggtagactctgggtgacttgctcagttctgagcttcagcaactgcagaagacggtctgcctgtttgctaatcccttccccgtcacctgcctttccgctgtatgtgtgagtgactcatagctcccaattatgattgtcacggaaattctgcatcagaatatggttgtgcagtgcaggcttggccattcccaattttttgagattgcagcattgccttcttatcaaagtgacctgagctgttgacaccagcgaaggtggagggagggctttggccccgcaaattcctgcagggaatcgaggcagaagcatggatgctttcttcatagaccttgtcttgggagtagggtatatgcagaagtgtgttcagatgtcgaggatttcaaaatgaagatgttcttctagataaaaatcttggcttatggcctattgtgttaaaccagctgtatagtcctgggctaattgttagtaattttttgtgattgggtactgtgttccaggcaagtgatgtttctctttagtaatgttcatgtcactcatttatgactgaagtgagagttgtatgtacaacagcagctccaagactaactagggaggagaaaaatcaggaaagtaaatacatcacaggctgacatctttggaacaaataattaagacaaccttgaacccagttgcacagcttcctgccgcatttgcagagaccgttgagcccttcctcacggttccacattcccagcgttgcagagaggacctgtgccctgtgtgtgcagggagctgaccctgctctgacctttactgtctcttttgcacagcctgcctgattgggaacccctggcccatttctccgtgggccaaggtggaagatgatgtgtctcttctcccagcacaggcactgccaaaggccagaggcattagcaatttttctgcaggggtttttagaggctgtggcatgaaatcagaacgtcgtcttccctgattctggatctgtgtgccatcctgcattcatcaaaactgtttcccaactgagaggctttttttttctttttttggaccacctggcagctccagcctatctagcatcatctttcatccctgcactgtctacctcctgacatattattttgcacatttccaagctgctccttccagtttcctgagcaggattctctacttggaacttctggggtgtgcagcctatactctgtcttctgcctggaatgccagctccagacccccaatttcgtgacaggcaaatgtctacccacgcattatttgtctctgtgcaagcagttgtctccccacccttccctcactgcaggcaggcagtgcatacctagctccaaggacctccagttaccatatggtagagtggctggtatccaaccaagtcaccgagaatcaaatgctgtattagataggacagaggcggggagagaaggaggaaggcaggagaaagagagggaaagactttgatagcatcagaaaacaaccaaaccagctggagaagtcaaaatcccagagaaaagagaactactgaggagtgaatgaagatggtgcatggtattcccccagaccttgctcactcctaggtcgcaccctttccgagtcatagacagagacccccagcaggaagcagctgctgaaaagtggggccaggtaggaattccttctgcttctgggattcttaacttgggacggtgagttcattcaaagcctatctaaaggcaaaaatcagacactaccaagtgtcgacagaaacatgcagcacctggaatcctgacatacagcaggtggtgtgggaactagtctgtcttttgggagaatcattgcttctaaagctgaatatatgcatatcctatgccccagaaattctactcatggatgtctccctaacagggatacagagattctactcgtggatgtctccctaacagatgtgtgtgcaccagaagacaaacacaagaatgtttacggcaacatcatttgttatgtccccaagccagaaagcatctggcttaatgggtggtagattcatcaattggacaaggagtagaataggagaaagacactgtgggcaattcatactcctagcatggaatactatgcagtgttcaataagaacaaaccactgccctttaccacgcggaccacaggtgtgctgatgataggaggcagagtggaaggtgccgggatgggcgtccaggacttctgtggtccatgtgatgttctcttctcgatctggatgctggtaacatggtgtgtttgtcactttgaaaatccatctggccatgcatcatgattttatcatatgtatatgtatactttaatatagattttaactaagtcgatggggagagagagatagtgagagagagtgagcgagagcaggcgagctttccagctatgttccagggaaaattgtgcacagactgagagccatttctcccatgttcacagtgcatatgtctccctctgccccttctatagaggttagtaattgtattgtattagtttgccttagttatctaactatattgtattagtccagaacctactttctagactatagaaagatgttaacgaagatgacggtaacttatgttaccgtcataagttacgatagcttacctatgacggtaagcttatataatgacagcttatatttaaatgctcacttttctcagatactgttctaagtgctcagtaaaaattaagtcattttatctttataaccaacccttgaggtagggaccacctttatatccatctcacagatcagacacatttgaaacttcgaaaatttattcaacgtacctaaatccatgcagctggtgaaaggcagaggcagcatcccacattcagcaggcagcctccagagcctacacatgccctggccatcaggctctttttcctagcctagtgattaggttccagtttatagcaaatcgtatgccagatactatagagagcgcaacacccagtgaggtctctcatctctgtatctccagtacagggcagcaaattaatgcctggtgtgtgttgaataaatggataggtagatgggtgggtgtgtgagtggatggatggatgggtggatggataggtggacagatgggtgggtgggtggatagatggatggattggtgggtgggtggatgtgtgggtggatagatgggtgggtatctggatggatgggtgggtggatggatgggtggatagatgggtggatggatgggtggatagatgggtggatgggtgcatgaatagatggatggatggataggtgtgtggatggatggatggatggatggatggatgggtgggtggaaagatggataggtagatggttgggtggatggatgagtgaatggatagatgggtggatgggtgggtaggattttcaaaaagcgctacatctgtagccttcctctggctggatctgcaggtaaggaattccctgagaaaggcgtcaaaatttcaggcatatttgtgtgccgagcatggcttggagccatgcttctcacctggagatgcccttaaaacagattccttggcccagccgcagagattctgagtcagcagatttcccatggatctggacaccctgaatttccagcaagctcccaggggatgcccctatacttatctgtggaccacaacagagaggcaaagacataaagctctccagtgcctttggtgccatctctcttgcaacaacagtcagtaatgtttcccttaaccctctgttaattggactaagcagagataatgaaagaatgatttttagggcatgccttcagggccctgcagagtgggtgtgcgcttgcagagaagggggcgatatgttttttcagcaacctcccccacacctgagtctgcactcagctttgacgcccggctcatcagtgtgccaggcggccttctgcctccaggccatttatagtgcagaagcttgtgaagccaaaacagtttgatgtgtaattgcaggaggaaatgggaaacctgctgagcgtggcaggatatagtgccttatcaccctttatgtgcagccactgcttgctggaattgccagcagatccacaccatcgacagaacggtgacatttttcatgggccgccgtgttctgaatcaacactgcaatggtgcgattagaggaggtaaaggaaggaaacaatcccagcctcgccggtgacagatcagtcgccagtcctgcttccctccttattacctgctgtcttgtgtgatatgcaaagcagctgctccacacgcattacaccttcacattaaccgaaaattgaattttatttggtagcctgcatatcatttataatactcctcccatacacttcagctctcatttggctaaaagtgtattctttacttcctactggccaagaaacagagaaaggagcctgtgtgtccattggtgcctgcagcccccaggcttcagggttcctgtggaacagggtgtcatcggcaagaattgaaaagcatttccctgtctccaaaatgccccagacgcctccttcccgaggggccacatgctgccatcagcctcgatccagagactgtgttgctgtgtgtttctttgcttggctgtagcatgctggctctgtgtatgcaaagaaacacagcgcagcacgcacagatccacccaaggaattcccactccaggggaagcacgtgggtagaggatcaggtggattttaactttaaaacttatcataatagttatcttctaaaaagcaaacaagacaaaaccctgcctctccccactatttcaaatcttaaattactatgcaaggaagttttatttgtcaaatcttggctactgaagttccagcgtaggagaaaatcttgcttggccaaaattactctcttttttttgttggttttttttttttttttttgagacagggtcttgctatgttgcccaggctggagtgtagttttgcaatcatggctcactgcagcctcgacctcccagtttcaagtgatcctcccacctcagcctcctgagtagctggtactacgagtgcatgccaccacgcctgggtaatttttgtattttttgtagagacagggtttcaccatgttgcccaggctggtctcaaactcctggactcaagtgatccacctgccttggtctcctaaaatgttgggactataggagtgaacagccatgcctggccaaagttactctttttaatcaaggttttaagtgtacactttcatgaattttgacatatgaaaacatgaaaccaccaccataatcaaggtagggcatttccattcctcccaaaagttcactttgccccttggacagtctctcctcccctcccccatcccctggcaaccggcttatggaacccatcattaagaccagctggcatcttctgcagttttatgtaaatggggtagtagggaatatacttttttgtgccggcttcttgcaccgatacatggatgtcagcttgatgacttgagctctgtccgcgtcattgtgcgtgtgtgccccttctaatgccaagcagcactccagttatggagcacacattctctgtatccgttccccttctgatgtgcactctgagctgtttctttgtttttgtactgtgaataaagctgctgtccacattcttatatgagtcctttatggttccacctacctggggtaaatgctatgaagggagtagctaggctatatagtagagaagtgtttaactttttaagaagttgctcagtagccttccaaagtggttgaaccattttacattctcacaaacagtgtgtgtggctccagttcctccacatcctaagccacactcagtgaggtcagttctttaaattatggccattctagtgagtggggcttcattctaatctcgctgtagtttaattttcacttccctggatactgacaatattaggcatattttcacgttctccttgatcatctcatgcatcttcttttgtggagtgtctgtttccatcatttaaccattattcaattgtatatcttcttcttgttgggttgtaaacgtttgtttatatattctagatataatttttgccagatatacacagcatattgaaagtgcatgtgtgtatgtatgtatatgtatgtgtgtgtatatatatatatttcaatatacatatttgccattctgtagtttgtttcttgggagtgttttcaaagagcaaaagttataacttggatagaaaccagcatatcaagtttttccttttgtggttcatacttcccatgttctatctataggaaaacttttcctacctcaaagtcacctcatgttttctcctatgttttcttctgtaccctttctagttctacatttaaatccatgattttttttttttttttttttttggagacagagtcttgctctgttgcccaggctagagtgcaatggtgtgatctcggatcactgcagcctctgcctcccgggttccagcaattctcctgcctcagcctcccgggtacctgggattacaggcacgtgccaccacgcctggctaatttttgtattttcagtagagatggggttttaccatgttggccaggctggtctcaaactcctgacctcaggtgatccgcctgccttggcctcccaaagtgctaggattaaaggcatgagccacaacacccagcctatgatggattctgagttaatttatgtttgatgtgcgtgaagggtcaatgttcttctgttttttaaattttttccgtatggttatccaattgttggtgcaccatttgttcaaaagagttcctttccctgtgaaattacctcggcggttttgtcgggtatcaatcagccgtctgtgtgtggccctgcctcctgtcaccctgctctgacgccttccttctgtcgacaccaccctgtcttgattcctgtgcgtttcaagtgaatcttgaaatctggtagcgtcagccattcgactttactccttccaaaattgctttggctcttctaggtcatttgcattttcctatgaattttagaatccacttgtcatgtaaaaaaaaaaaacctgctagaattttgactgggattgtcaaaatcactctcaaaaatcactgaagttgactctgaaatgcagcatgcaagggtttgggtgtgcaacttgtacgtgagttctagtgcacaaaagaaagtgagagccagcaagccgggctagaggggataaaggagagagtggtggcgcatgtgcccaggctcccgtcggtccctgagagctttcctttccctagagtgaccacagggtgggtaggaggttccctaggatccctggagggtgtgtccctttattaataatgataaagggtgtgatgtagactccttaaccttactacatgtgaaaagagtgtttattgctgaaaggattaaataagataagacgctgagtagttgagctgcaaatgcttgtggattgaagtctaaagccagcttacatagacccacccacctgcccatttcctgccgtggcctcctgtgtcccagccaccaccatcgtcccatggcgcatggctgacgtgctgtcctgcaaagggccaggcgttaccctctagcatgtaccactctccactggcttcgttcttggggctcatgatacatattatttggttacttccaccttggagtatcacaggtcaaatcagccagtaactcgtggaactaacccacgagtggtgtttacccctggataatggcccagtggaggggctggcctgcagctcacacccaccatggttttgctgaatggtgctcgttagactttgcataatcgaatttagcccagctctatgaaggctctgcacaagctagtcccctctctccgctatttgatggaataatagatccataggagaattcatttgcaactctaagccccgagttaaagacgtctcaagggatgaacgtgggtgatttgtggaacactgcgatgcatttatgagatagattgcacgttcaccgcggcgctcaaagaaaccagatcgggttgcattagaggcggtgctgtaatccggctgtcctctgggaaagaatgcaagcttccagtgtgcgaagtatgaggggctgcagaggaaattgctttggtggctctggtcctgggagcaagtacctgcttctcgttcatttaagcacattagcgagcttcataaacacttaagtggctcacgagatgcttcacttccaggcctcgccccacctcctccgctgtcacacagaggccaccagaaaccacggtcttctgggtttgacagccaggcagacaggaccaggccaggctgcagctgctaacccctgcgctggcaacttccagaccccctgcacaatgtcaccgtccagtcattcctccctgggctgcctgccttcatggggcccctgcaattaaaaaaaacaacaacttattctcactcctttcttttaatatgtcttattaataactgtgtaaatttgtttactttttaggactccatcatgatgtaaagtagataaaacaaccaatttgtctttctttttcttggtacatgggtgtcctgcagccttcattccttccaacccccgcttcacgttcacgagtatgaagttgaattaactcatgctttgctgaagccggattgtgagattgtgtaggcagacgtggcttttcttctgagcctgcaaagcagcagaattcatgacaatgggttccgtagtaacagggactgactgcgccatgctgtctctgtccatccttacagcgctcaggagtttgcatgccattactgggaccattttacagaaaacagaggctcccaggggcaacgtaacctgccccaggacaggcagccacaaggcagagaaaggagggttggacctgcacctgtgaaaccacagccctggggcatggcttctgagactcatagctggggctgaagatccctaggggggctctgctgggctcactgctctccagagtggtccagcccggctgcagggtgctgcttccagcttggtgcactgcggccggaggaggtggaggatggaaagtaagattcaaagacagggagtgcaaggggacagtgatacttgaggactccgaggaggaagtaggagaatcatccggaatggccagcctgggccgagcctgggccaacacctgggttgagcccagcccacagagcggctcccgggtccttgcacctgcaggaggccagagctgcttttaccttcaaatgttagatgaggtgccagcacctggacaggagacgtcctgcagtcagctcacagacatgagggtgtcgactccccagtacccttcctggagacgcagaagtcagggttttaaagtgggggtaaagacaccagctgcctcatgtgggtgtggggagcatcctgttggcccatgtgctggggaggggctccaggactctggccacatgtgttctgtgaccttccaggccagtgtggcctggccctgccccacctcccctcgccttctccagtctggccacacttgccttctcccagccccaccacaggacctttgcacatgctcttcctgctgcctggagtgccctttcctaacctggctagccctgctcatgctccagatcccaggtcagctgtcacttcccagtggagctggccctgccctcctcgactaggtcaggacctcctagtctcggcttcaacccccaccttgggctcaccttgctcctctcttaagcaccatcatgatcactcttgcaccttcgcccccaactgcatggattccatttcaaccccactggccagacaccaactgggtatcctgcaattcacttctgacactgtctagcagaggcagctcagaccccacaggttaaggacaaaagtctccaaaagactacccccacttcagatgcaagccacaagtcccgggggaccttggctacaaattctggagttcccacaacatgctcagaatggataactcactggaatgactcacagaactcagttacctctaattgtgctttcattataaaggaaacagaacgcatagggtgaggtctgggaggggcagaatttccatccctctgtcatggagtcagcaggggtcagcaggggtctccttccagcacatccatctgtccaccagcacaaagctctgctgagcttcagtgtccaggatttttattgtgttttgttatgtagatatgattaattaacacattggcctcacgattgaactcagtctccaacacccccccacccccatctggaggtcaggctagctccaagtccccaactctctggtcctgtgcctggtctttctggcgaccagcctccccatcctaaaaccacccaggggccaacagtgagtcacttcattagcataacaaagacactccaatctctcaggaaattccaagggtttttagatgctccataccagggcccaaggacaaaggcctcttgtctgctctgcctgcagcaagctcagaaaggcaaggcctggcctgttttgccccctcctgcgtcctagcacccagcgcagggcctgggacatggtgggaactcaccaaatgctgatatttgaaggaggcagtcagtcagcctgaaggtggcagggcctacagaagacttgcaaggagaccgtagaaaggaaaatgcgtctgtctttgaagagcagcaggaagggctcagaggtgccctgctgggcccccgccccccttgtcttgcctttctcaactgcttttcaaccagagaaatgactcgtctagcaagatcctaggcccttagtagagagctgtttatttgccttgatgcacatttctttttcctttatggtatatgttattttcctctggcaagatccctgttttctttggaacggtgcttaaaatgatagcatttagccgacgaaatagcagcccatcttctgtctccctgtgacgcagcaaaaacgcggtgactagccaaaatgcctcgcttccttttcgttggcacagcaagtccttgtgccgagcactgattgctaaataaggtatctgggctccagtcacttcatcctaagagcagttgtaatcagagtttcagcagcacacaccgccctctcagggagggagatgctggctgggccgtcttttacaaatggatcgtcagtgtgttcgggtaataaggaaacgagagggtttttcttttcctcccaagtgccactgtgcatggcggcttctctcatggaatctgggtccattgtactccacttaaaaggacttaggtcgctggggaccctttcatgactgccctgatgcagacggtcccgttttgttgacacactccacacgacggttaggaaaattccatggggcctccagatgtgcccctggaaaacagaagacattctgatgatgccagaaagactggtccttttccatccatccaggaatcgggaaacgttttctactaagggccagtaggcttttcagcttcatgggccggatgtccatcagaaccactcagctccaccacttcagcaggaagacagccgcggacagcacttaatgacccgtccagactccaacaacgttttattttcacaaacagtgcatgccaggtttgcccagtgggctatcgtctgccaccctgaaccctgctacaattctgattcaggtgtcccaaattaggcaaaatgcaccttgcatttccctgacttatgggtcaaatttttccagtgatgcctttaattcaaggacaagtatcttgagaaaatgtattgttttttaaaaaaaattatactaccatagaaataaataaactcaccaggatgaaagcacagcttccatgaagaattcacattatatactatgaaaatctataccccgtgcaatttgagtgtgttttttctaaagaagctggggaaatctttctgtgagtttcagttttatagtgtgtgttttgttctccttgagaggacctcgtaaatcagttggacacgttttgctataaaagaaatattttatgtgtgaaatgctgtcttcaagacttttctcttttatcaggggtttgtaaaagtagaaaatggcatgtgggtataattggttggccatagtccttaactgtagatgtcatatatctctgctaatgcaaaatttatttgcatgtcagaactttatttgagtggataagggcagaaggaagctgctctgaaaacatttcatatgaaaaggcatattctgtacttccaaaaaaaatattggtcaaaactttgccatcctgtgttagtagggtgctaaagtccactaactacccacagaaaacatcccagcagtgtccagaaagagaaccttggcaaaagtaaatcctgccatgttattaaatcaataagattcccaaaatcagtggaaggaagctcaattcattttcaatgcccccagacaaatagtaaaaattagctaaaaaaaaaaaaccaaaaaccttaacttacctaaaaacatgaagatcataaaatttcattcttatttacacaatgaaaacacattgggtaaagcttttcaacgcctctttcatttttccccccaagcctagcatctgccttcggtgttgactcttctgactgaatatatttttaacttttaaaagacttgtcttttaactgaaaaatagtttgattttttgtcaaaatggtcaaaacaatcttggtgcttgaagttgtgttatttgaagattcaggcctgtcttaaaagcgagagcccaagaagggtgttgcggtgtgcgttttggttgtgctgcagtgtgcgtttcggttgtactgcagtgtgcatttcggttgtacagtgtgacaaaacaaacccctcaaagctcagaggcgtcaaacagctgctccgtggctctgagggttggctgggctcagctggcctgtccggacttggagtttctcatgcacctgcactcagtggggttaaggctggcatcatcccaagccatgaccagccagggcatgcaagatggcacatgtatgtggctagtagtggacgctggtcaccagcttggagatatgctggcagcaaagactggacatggttcagccttctgatggcatagggactaggttctgagagcagatgtccccacagggagcattccaagagtcctctgtggaaaccagaaggctcctgtgacccagctgtggaaggcgggaacatctcttctgcaggactgtatgagtcagacagtcactggccagtccaggttcaagggctgggcataagcccctccctctgatgggcagtccagcatgcaaatacagaggggtaggattcgaggcgcctctttggagaccatcaccctcagcactagaggggactagcggggagggctgcccacatcctaactctttgtatcgccctagttacatggtgatattggggaaaaaaggcattcttgtacagaccactcctaaattgaattcccactctaacatgcctcactgctcatcactgagatccatctctgcctaatacactcaggtcatcacggcttgatcttagctgattgttttatattgcaactgtcctatccataaagcctcagtgcaatggagttggttgcaaagtgaaagtgcaagaaatgcaaacatgcaggatttcatgaagatgcctgcgctatcttcatcatgaagatgaaactgctatcaagaaagtgcaggaattgcagccacaattattgagaaaggaggtggagttcaaccagataaccactgaggaggcagagatccagttagcccatgagagtagaagacacttactgaagtgatgaatgattcagagaacaccttcaggatattagtaacattctagactcgtttttgcaaagatcactctttgcaatggggctctgaaaggcaaatgtaaagggaacaccctgttgagcagccacaatgcttgttagccgcaacaagtcaagtaggacgcagtcactgcttgcatgtctttcaccctaaaagttagcatttagttgcagttataagcaaagttttattaaatacaaaataaaatacatctatttttgcaaaattttagttttgttttttggatatgaagtgctaagcaaatactcggtttgcactcttgactataaaatttcaaccctggttttcagtggattcctgttgaagcctttctgacagtatggattgtccttcagaacaaagacctcctgagatgtgaatccggggaaccagggctgcaatgcctgctttcttctcggcccgtggcgggcgccatggaggaagcgctattgttggtgtcctcagcaggtgtcccgatgcctctggttgtcatggcgcttctctgagacaggcacagcatggggagaagttctggcaatcacatcaggtgtctaaatgccactgccctcgcggtggtaagttctggaagtctgtagttgtcgggaagagcccaggtcagcaaatcggcaggcagattgctcagaaaagtgtcaaaacagtcagactttggatctgagccggaagtttcttttgagttcagatatcacttcaaaaacattttctgtgtccagcttcagtcttggggtgaaaaagacacatttctttatccatttcagagcagagatgacttctttgagttccaagcgtgtgctatgtggcgagctttcccacaggtcacgcagaatctcagacttgaaacacagcgtccaacaccggccctgctgtcatccatccatggcaggagccaaactgtccattctcttggaagagtaacaagagaaaggactaaatttcagaatcaggggtttcagaaggaaaggaagcggaaggagcatccaggtcagccccttggcttcagaaaggacttaggcagagggactgggccagggcctcacagctagttggggcagagctgggcaggcttctgggctctgctcgctcatcgatgacactggttatacccactccaggtgggagaaaagacccctttccccactgccatttaaccactgtttgatcctgctgtgttctgaatgtctgtgtccctccagaattcatctgctgaaacctaactccaaggcgatggtgttagaaggcagggcctttgggtggttatgaggtcatgaggactctgccctcaggaatgggattagagcctttataaaagggactccagagagctgcctggcccgtcttccatgtgagcacacatagaaagtaccatttaggagaaaacatgccctcaatagacaccaaatctgctgacaccttcatcttgggctttccaagctccagagctgtgagcaataaatttccatggctcataaatgacccagtctaagctcttctgtgatggcagccctatcagactacgacaggaccctaacaacaagaagagccaggttgggttgtgcaggtggcacggcacgttcatccaggttctctccaacccttctttactaacaggacatagcttcagaaaaacttgagccctgctgaggtggaaactcttgcagatttcaaatccaatcgtttgtatcagcatattcttctgaaggacagtgatgagcacgaatgtgacccacacttgaagaccacccagacgcaaatgccccagcagcttccagagacagttattactgttttaagtgcatctatttagcatgatggatttgatcagtctttgctaaattgagcacataagcgaggatgtatttaaaggagtgttagtgcactttttataaatcccaaacgcagggcaagctggctcatgccactgttgaaaagcagtgtgtgtccgaggaagggccgcatcacaccgggtgtggatggaaccatgcctccctgacgtgcagaccctccgaatactccacttgcagaacctgtttttaaacaaacatcattattatcaggtcagtgaaacatccccatatcgcttatgctcatcatctgctgtgcaaatatttgtggctttaaaagaataacagatcgtgagaactccagtaaaatgattgcagaactaaccacccttttaagtagaagtgacatttctaacaggcccactcagacggttccagccttcgctttggggttctacattaaactccacttaggctgcctgcagtgaggggcagaaggctgcgttacagagactcaaaggcaaaacgtggggtgcttgcctgcacccagtggagcctcatccacgatcagtgacttccagagacaggcaagggtgtcaggaggctcccgggatgcactgaagcagctccttttaggaaacaagcggcaaagaagaattttaaccctctttatgctgataaaaaaatacacacgtgtgggaatgcatgtcttgggtttgagcactgatcctttttctgcagtcccccggccttggcactgttggcctcaggggctgaatcaccccatggtgggggctgccttgtgcattgaaggttgtttaacagtgtccctggccgccaccctttagatgacccctaggtgcaccccttcttccttcctccacccccaggtatgtgaatcacaatgtctttagacgttgccagtgtgtcttggagaccaaagcaacccctgattgagaaccgctgcctaggaagacacacttttcatttgtttgttgttttttaatgtaatctatagttgagagacaccctgccccacctaggtgtgaagcacctcgctttacctggaaggctgggcatatttaaataccactcccctgcacgcttatttgtcgcagagtggttaatgctctttaattggtgcagtaaatattccagagtcttccttgttatgccggagtcatttagaaatcagccctgaaatgtggctgctattttagggatcatcacacatcatctgctgtttggtgttaaaccctgagccgctgttatttaacactgattaataaatggcaggttgtcagtaccggcagtgaagacacttcaaggagccattgttcttttaaattaaaacatttaaacatttaaatccagggctggttctcatggctcgttttaattattccttttgtcttggcatacctttcttctcctgatcacacagctgtcacgccagcagtacctggagtcggaacacgacagccctttccctattagctgccattattttcgcaaggaaagctggaagctgctggagcagatgttaattttgagagaagactgctggctaagttattaaaatgagcgcatccgaaggctgcgactcatatgatttatacgcgggcagggcctgcaggaccgggtcttgcttggctctgtatgtgtgtgtgtgtgtggatctgtgtatgtgtgtctctctgtgtggtgtgtctgtgtatctgtctgtctctgtgtgtgtgattgtgtgtatctctctatgtgtctatatctctgtgtgtctgtgtatgtgtctgtgtgtgtgtatgtctgtatctctgtgtgtgtgtctttgtggatatctgtgtgtgtgtctgtgtgtgtatctgtgtgtgtgattgtgcgtatctgtatatgtgtctatatctgtgtgtgtctgtatctatgtgtgtgtatctttgtggatatctctggttgtctgtgtgtgtgtctgtgtgtgtatctgtctgtgtgattctgtgtgtgattgtgtgtatctctatatgtgtctctgtatgtctgtgtgtgtatgtctgtatctatgtgtgtgtgtctttgtggatctctctatgtgggtgtctgtgtatctgtatatggctgtgtctctctttgtgtattttgtgtgtgttcatgtgtatctatgtgtgtgtgtgtatgtgtatgtatgtgtgggtttctttgtgtatgtatttttgtgtatctgcacgtgtgtttctctgtgtgtgtctgtgtatatttttgtgtttctgcatgtgtgtgtctatgtgtgtctgtgtgtgtatttgtgtgtatctgtatatatgtgtatgtgtgtgtgggtttctttgtgtgtgtatttgtgtgtatctgcatgagtgtttctctgtgtgtgtctgtgtatatttgtgtgtttctgcgtgtgtttttgtgtatccgtatgtatgtgtatctttgtgtgtctttgtgtacatctgtgtctgtgtgtatatctgtgtgtatatgtatgtgtgtttctctgtgtgtgtgtatatttgtgtgtttctgcgtgtgtgtttttgtgtatccgtatgtatatctttgtgtgtctttgtatacatctgtgtctgtgtgtatatttgtgtgtatatgtatgtgtgtttctctgtgtgtgtctgtgtatatttgtgtgtttctgcatgtgtgtgtttttgtgtatccgtatgtatgtgtatctttgtgtgtctttgtgtacatctgtgtctgtgtgtatatttgtgtgtatatgtatgtgtgtttctctatgtgtgtctgtgtatatttgtgtgtctgcgtgtgtgtgtctgtgtgtgtctgtatctatttgtgtgtatctgtgtgtatatgtgtgtgggtttctttgcgtgtgtgtttgtatgtatctgcatgtgtgtttctctgtggctgtgtgtatctctgtgtgcgtgcacgcatgtgttgatggagcattttcccttcccatcttggtgcttgctacggggaattcttgtccctagtcttttttctccactcttcccccactccctattgcaagaatcccagcctgaccctggccacctctggccagggattgtattcgaagactgtcaggaagctctggaatcaatggagctgggggaccccagctgaacaatatccaggaaccaagaggcctgtggagagccaggcagggccccggccatccccaggcaggacagcatcagtgctcagagtctgactccgaaggaaaggtccacttggccaagccgaaggcatgagttgttgccccaggtctctccttcaaagtgagtggccatagcaccccatgccaagaccagccacagtgagggccctctgaggcaggcggggcatgggagtgcagatgataggaagggtgggagtgacgaagagctgggcaagaccaatgcccctcaaacctcccctggcttccctccggcccctcctccccctctcccctcccttcctcttccttccttcttccaacaggtcagcaggaggcaaagggaccaaggccattctacttttagttctagagaagcaattttctcaccaacttcagaatacaccgggtttgtgttatatttcacagtgctctcgatttttaaaaaaggaaaaagaagtaaagccatgttgcagcattaaaggtagagacttgcgagacctttcccaggatgtgacgtgctggctggacgccatggtccttcgccctttcctgatttgacatggggagggagggttcccagcccatctgagctagtcctccgcgcagtcctgaaggaggccatctgtgggccagtgcctggcgtcctttcctccagaacgctggccctggagcctcccatgcccgctggtggatagcagttggttacagtgtagcacacatggcagtgaaactgaaaccacaaggaaactgtgggtgcgcagttgatttagaagtgatgattcctaggtccactttaagaaagaccatgaaaaatgaaatcagagatcaaatgtgtgggtcatacttgggaagggtgtgttttactaagatgaccttggaaccagactggactagcagtcactaagcagtgtcagccagagataatcatgtaaaatacatttattagaccaaggcctactgctattttcttataaacttatttctacaagtttgtctcacttttatttatatatctaaaaataagtaggggtgcaaaaatgtacataaatacttgattaattattttgcttacaaaattacttctccaataaaaagattatactttgatcatacccatagtttaagttaaaacaattttaaataagatctagcgtcatacttttaaacaaacagtcttattctattggcatcacttgcactgttccgtgtcatcaaacgttcatagctgcataaacattccatctcatggattatcgttcagctgatccgcctcatcttaaaaagttgggttgcttgcacttttcatgatagaaggtggctgtaaagcgaattcttgtgcatgcgtttttcacacatctctgttcatttccttggggttgactcccaggactgaagaactagaatggttttaaggtttccgcatgtgttgctggtctgcccgaagaaagcccagcccgcttatccattcatgagtttgtgtgtgtctgagcacctgtctcaccttaacccagggtatgtgttggggtggagagtgtgtacaattatatatataccttaataaatatattcagtttggccaatttgttaggggaaaattgttatttacacatttttatatgtcattattagtgaagctgaatttttattgccaattgtttattggtcattagtttttttctttgtaaattagtcatctctttggattttgtgtgtgtttattttaacttacgtttttccctctggagtacatatcttttccagtatgatttggaggaattctttgtatactgtttatttactaacctttttgcctaccatactcattataaatactctctgtgattttgtcttttgggtttattcatggtgttttttgtttgtttgcttgtttgtttttgagacggagtctcactctgtcactcaggctggtgtgcggtggtgcgatctcagctcactgcaacctccgcctcctgggttcaagcaattctcctgccccagcctcccaagtagctgggattacaggcatgcgccaccacgcccagctgattttttttttttttttttttttgtatttttagtagagacagggttttgctatgtaggccaagctgggctcaaactcctgacctcaggtgatctgtccacctcggccttccaaagtgctgaaattacaggcatgagccagtgtgcccgacctattcatggtgttttcgatataaaggctttcctggtatttggaagtcatgcttttcagtcttgtcccatttcactttttaatcattcggggtctcctactttcccctttcccactcagatccattttctctcccctgctcattctacttcctttttttttttttttttttttagcttgagatggtgcatggaaaattttaatacgatgcatgggaagggaggagaagaggtaggagcaagagtagaaaaggaaaaataagacttggatggcgaggacgagaatgtcaccttttgcctgtatcttcaaactctatttttatttgctttttaaaacataatgatgtacaagactttcatttggaaattatatcttcattccataaccctcttttttaccttcctttcatcatattttccaacactttccccagaattctccctcttccttcattttccttcttctcttactttcccaacactctgaagcatgaacttactttttggaggtcatgggcttttcccaagattctgccaccagcatcctgtttgtctttcttgttcgtccctggggctttctatgctgatttccatacctaatcaaggtagaaaagaaccaaaaggatcttaaaagtgggttggcccaggctttgctggtttgtttcagcccagcaggtctttagactccatgctggctggaagccagtgccccaggagacatttgcacttaattccttctgtatcccaggaatcacggacagctgggcaccttgtttttacattctgctgactgtgaagaaggtgcttttatagtttccataagcgatgtttatgaaacaaacctgcactcttccagaccggaaaggtattatgcgaacgttttatgagcagaatgtagaaattaatggagaaaaactactagaaatttgggtcgtttgatgttgtttgctactcgcacccaacagagtacggttaatcatacatcacggcacagcctcctccaatctccttcataatgtgtttttttatttccatttgtgttgggggttttgtaaaatacacacattgtgctctctgggaagataatgggtgtctctgaaaggacaaagcggactctgatttagtcggctctgtgctgtgataggagcaagaggagttttttgtattgcattatcaccattctggtggtagaaaatgacttaaatagacctagcctccgaaatcgtcactgtgttaagccttgttatgatgaacttttcctcgcgtgcacgtgcagttctgtataatgaatatacagataggcacccgcgcatctgaggttttctttttgatactctgaaaaggctattctttctttttttaggccaaacttcgaggttagtgatggggaaatagcaataataataataacaacagcgtgaaaaataaaatcgaaaagccctggcatatttaaattttgattagaagccagctgcagtgtctggattctacagtaggtcaagttaaggggctgctgggtcctgaatattcagactttttctctactttttaaaacctggatccacattaacttctgtcacttcacacacagcctctggggaagcagttggggatgggatggcacctgcccactgtgtgcagtgccaggggctgggtgagggtgttcaggcttcatctttgctgcttcaaggggcactggtgccagccacattagcgttttaacccaagccaaggctgtcctcagaggcccacagcatggtgcatttatctccacgggggggccgagggaccttgaaaccaaggtcagtgtggatggctaggccagctgccattggacccaaggaaaggggaaattaaaaccattcatttacatattcctgattctcatgtttgctcccaagctctgtgcaaaggctagcctccactcttcccggcagctccactccctgagtcactccgctaataaggactatccagcctgccttctagtctctctccgtagcctgtgacgtggggatattttgtaatcagacgtatagtccatcttgcttaaatggtaatttgtacagtctcctaatagtgtatgaagagaaggaggaaaagaaagaattccaacttttattgctttgtaaagatcattttaacagtagtgtatgttgatggtagagaattaaaaaaaaaatggataagacttaagaacttgaaatcaccactgctaatattttgatctacaaataccttttctagcctttatcactaactctacagaagtgaaattataccaaatacttttggttttctcctcaatgtacccgtatactgaggctattattagacttaattttctataccatttttaagagctgcatagattctgtggtattttgtggtacttcatatggtaatttccataaccaagttggaaaatatgctttctttcaattatcctatcatcagatgggtaaaaggcactcacacacactttgcttttgcaaaaccagcgagaactctgtgttcccttttggagcaggtgccgtttgcagcactgctggcctctgcccctgactaatctcaacccttattcagaatggaaacttgagggtatgttaatttctacagtgttgacaatgatgtcattacaatcaaaactatcttagtggattcttttaagtcttcttgaatgaccttctgttcatgaatgtttaacccaagtctggttcagggctgtctctgtatgactcaccttcctgggataatcctccaggacagggccttggtgggaccccagccttcaaacttctggacagttgagactaaagggaaatgatgcttccaagaggggctcaacaggacccacagatccagccttacacacatgcattggcccagccatgcagggaaatagaaacagttctcccaaactgttctccatgcctttttaagtctgttttcacagcagtgggggctgagatgctgtgtgatttgcaccaagccttaacctctaaagatacagtttatttcatctgtgctgggtcttcacttgacagaggatttattaaggaagacttcagatgcgaacggctgctttgatattgaaatatgctttcggttttgcaaatacgtttgaggttctatctatgtctattcctattaaaagctcagttccctcatcattgtcccaaaccgagaaggtgtctgagcttgctgtgataagacaaggacttctcagggcctggatccacagctccaggattcattcagcaaactgctcggtggccactgttgtcaggacactgggttagggcagagagaaccctgctctccaatggagagagtctgctgctgtgctccaagagtggaggtggctagagcggggttttctctgctctaacccagtgtcctgacaacagtggccacccagcagtttgctgaataaatcctggagctgtggacccaggtcctgaggagtccctgtgctatcacagaacaccagatagccatgatgcatctgacacagtccgtttgtgaggaagtccacaaacctggatcataagcctccatagagaggggcctggaggctcaagagagcggagggtgttttgtgggaatagatgctcaccagcttttctgagctttttccctccctctcacgcccccccccttccctccgtgtcatcctgccacctgtgcatgtttcttcaatagagtcttgagtaactctatgatagagagctgtgcctggtgctgcggaagcctgatgggcatgatacttggcacctggcttcaaaaagcggctgcatataaggaggaaacggcacggaccaccatggagcatgtgcgtctcagctgcgtcagagtggttcagagtgcttggcctcacgcagacctggctatgaatctcaggtaggattgttgcttacttgaagccacatcttcaaagcctcagttttgtaatctgcaaaatgggtataataataccgttatatatcttaatcctatttccaagatacaggcaagctaacaggttcaaatgagaaaatgcttctggggcaaagcctgaagtggcagcatttcttcctcttctaccttccaagtaggtcctttgcttactgggtaaagggaagatcgccggagccctgagagtctatgtggacatacctaggagagctggggtcgccaaggaaaactgtagaaggtgggagggaggagggcactaaagagaggagaggggaaggaggaggagggggtaggaggctgggaggaaggcctccagggtggactctggacagggcaggagggctccctggccgtggtgtgccagggatcccagcatacaagcttccatttgtctccaaaagcctgatctgcacaacataaatgaggagggatgtagagacttcccagctcttctcatgcctaggcacttagatgatttagggagaaaccactggaaaattaattatccagataattgcctaacacttaacttcactttataaaatggaaacttgattgtgagtcttgacatccaccccttcagtgtccttcagaaaacggctgtggccccttcctgagaacctggagcattcgcgcttttcctttcatttgtggattgtgacgctggctcagcctgtgcttgggctccactgcagagttgcgcggctggtggaggcttgtgctcaggttgtaataaagcaatagcctttcaccttcccaggccgggcccacaaacaggcaggtggcagacttacatgttgagttccaggtgtctttggaattaatctcgtgtcagaaaattatatgagatgatgcctgatgcctcttgtccataatagatcttagtccctcatttaaggatttccttacactgcttgatagagaagaaaagccagccttaagtagctttatgtagggagcttgatttctgaaaagattgctaatcctagtgggaatttatataaaagcgttcagactctgcagaatagccacgttttcgatatttatcaaatgcagctcttcttgtgtgaataatgcattctggggcaggcttggtaaattgctttagttaatgaatttcaaaggtagagatggttgttgaagcatctcatctggtgagcttgctgtttgagttttgctatttattcagtttttaaatttttccaattgttgaagagttttcccacaccgtacagaagtaaggcagggaaagcaagaggtgtgtgatttggttgattcttcacacttcatctttgtgatgcatttttttttatgtgtaaaggccttgcaggccttgtgattcagacagtaaaaccttgagaaagtggcccctggcaggtggagaagatatgaaataggggagtgagacaaaaacagaaaactgagtgacacttattatgtttctcagcttttccaccatccatttacaccacagccctgggttctaaccagtctgccttcttataataacacacttaataaaaagcatagctggtatttaatcttgtaacttcttagaagttaaactagtgatgtgtcttctcctaagttagcagtatagaaaaagcttctattaagaagcaaataaagaaatgaaaatcaaacttcctgggaagtaattatatgagtttataataagccataagacatttgaaaggaaggggaaaaaagccaatgaaagagtgtattgaggatattaagtaattttaatgtcaccatttgatatccaggaacttgaacaatttatagttcttgaaattgtcaaattgaagcattcatttttctgtcatgggagcagtggcagtgatgggggattatatatctcagcatataagaagaaggaactcgcattgcactttgaagatgcaagttcctgtggggcggcccagcagagacgtcagggctgagcttgctgggttcgcatgtgtggaatcccagccggctgtgaggtcctccaggaagtgacgggacccccctgagcttcttccagtgtcctgtctctcatgggaggaggatgctattaccacccacttcttaggtcctcaggagtaaaggattcagtgtgtggaaaaggctctgtgtggagctgggtccagggtgcgctcaacccataacaaccagagccacagagaaagatggtgccttctgggcagctcacctgcagacaatctgcaggctgtagatttgattctatgtatttaaaaaccaaatacttggcctatctttctttgcggaattataagatataatctgaaagaccaaaaagtgacctgatatggtttggctgtgttcccacccaaatctcatcttgaattgtagttcccataatccccacatgttgtgggagggacccagtgggaggtaattgaatcatgggggcagtgaccctcatgctgttctcctgatagtgagcgagttctcacaagatctgagggttttataaggggcttttccctcttttgctctgcacttcttcctgccgccttgtgaagaaggataggtttgcttccccttctgccatggttgtaagtttcctgaggcctccccagccctgtggaactgtgagtcaattaaacctctttcttttataaattacccagtttcggtagttcttcatagcagtgtgagaacagactaacacatggccatcctggtgacctgtgtgcactctgatgaaattccgcagcatgagtctgcctgtgtgttcactgagttcccttctcccaggccctgggccggctgctgggatacagtggtgaccaaagtggagacagttcctatcctcacggagtttatactcaagacggggagtcagcaaagtaaacaggcagccacaaccatggggtgaactttgttatggggacatgcacctggggggaaggttgtgatgggaggggcacccgggtcaaacacgggcggttgttagtgaagagcccgcaagacagagtaggagtcagggggaacagggagggaggggcatttttttctttcttttttgagacggagtctcactctgtcccccaggctggagtgcagtggcgcgatctcggctcactgcaagctccgcctcccgggttcacgccattctcctgcctcagcctccggagtagctgggactacaggcgcctgccaccatagccagctaattttttgtatttctagtagaaacggggtttcaccgtgtttgccaggatggtctcgatctcctgacctcgtgatccgcccaccttggactcccaaagtgctgagattacaggcatgagccaccgcgccctgctgggaggagcattttaggcaggggagcagtgtatatggtagcctgcaggtcagaggtctgtggcaaacgcaggagcctgtacctggtgttcgttttccccactacggggggcagtggtgcaggagtggtttgaagggtgggttccgtgaccagggtaggaagcatggattttattgcaagcaattgagaaccatttaagtgttttattttctttaacagctttattgagatataattcacataccataaaattcacctttttaatataattcagtggtttctagtttattcagttatgcagccatcaccaccaattcaagcacattttcatcaccccaaaaagttctatgtaatttttcatctcacgtgtagatttgtgtaaccaccacaaccaacatcccagagtgttacatctccacaagcatatactttgtaaagacatcaatatcaagtccaactttgagatacaggaagatgagatggaaagcatatacactgcttggtgatgttcaatatgtaagcactccagaagaaagcacagccacaaggtctatggcttgtccatgaaacctctgtgagggtgacaactgcaaacacccacagcccagggtgggctggcagtgcgagtgcctcaaatcagtgtgcctgtgggttgtgtgattctctgaattggtgaagagctctaggaaatttctgagctgcacaaaggacagcttcccttctgtgcatatggcaatcgcactcctgaaaaattcagtgaaggattttaataaatcccgcaaaaaccaggtgatgtttatatgtaaaacaaaatgaagatctggactcgggtaatcataaacttctaggactagccagcgactagccagccacatgtggagcttcccatgtgccatgcagggtgcattcactgccccggcctgtgcccataagaagctaatggcatccctagacattggaaaaacccaaatgtacctctcacatttccaaactgccccatggggtggtgccacccccatgagagccactgtgcttgactctgagatcctcgaggacgctgtgtatggtccttacatgtcatctgcagcatgggaccaagcaagcatgaaggagccaaacatgcatgcaggtgtggatagatggatatatgggtggatggagaataggatggagagaatgaaggatgggtggatggatggatagatctatggatagatggagagaaggaaggatagaaggatggatggatggatggatagatatatggagggagggagagaaggaaggatagaagggaagaaaggaaggaaggaaagagagagggatggagagaaggaaggaggaatggctggatggttggatggatagatggatggagagtggatggatagataggtaggtgggtggacaggaggactgatggctcttaaataacctctgtctgcaaaaccctcaggaacctgctgcccagcatttgtactgagttcaccatctctacccttcaggcacaatgggcctctccactgctaaatagaatgtgttggcaacatggcgggtgaaatcttaggttggcttttggaagaacattaagttgtttaagaatctgaggttttattgtaggccagtggttctctgctacggctgattttgaccccccagtgggcatttataaatccctagggatatttttagttttcacaaagcaggggagtgtgaactggcatctagttggtagagtccaccctggggataagcaggggtgctgctatacatctctcaatgccagggcagctcccacatcaataaataattcacccacgtggttgaaagtgctggggtcgggaaactctgctgaaggtgaggagctatattatttcttaaaagccattataatgtgcataactgatctttggaacactgaggactgtagaaagatcttgtgcaccttcagaagacaacagacacgggagaggcagctccagagaggagctccgtgaggaagcttcctgaggtgtctttagagcagaaagtgtgttccgtatgttggatgtgtcattagtatgattatatgtgcttatgtgaagacacagctgttctataaatgcagcaaagcttctgagaataataggagaacttctcctgggggtgagtaagttaacatgctgggaatgagaagcttggattcacaatggggtaataaatggaaactcgctgcacaaagaagaattggtgttttaatttgtcagaaaattactgagtggcaaaaggggctttgtgccagacttctcctttcagagcgtgaattttccttaaaagagagcaaacctgtgtttacagcatccacctgaaacagagaaaatgataaggacaaaggacctccgtgaggttcacagacaagccacagtgttgctatcaccacgggggcccttttggagacaaggagcggacaaggtcatggtggtggctgcagtcctgctcttccacttacctgggatgttaccaacatccccagtcactttctctgcccacctctactgtctctgtcactctctaccgtctgtggagcaaaagggtggcttgttggatcctccttcagataactctgttaaaaaagacactaggatagagagagccagagatgtgaacaggatatagagccaccctgagaaattcaactcccaaagcaggtgaaatttggtggtgactgtgatgtgagtgacagtggcagggatgatgacaatggtggtgatagtgatgggggacaggtgacagtgattggtggtggtggcaaagatggtgatagtagtgatgatggtgatgctgatggtcaccatggtgatggtacgatggtcatgatcatgatggtgctgacagtgctggcactggtggtggtgatggtaagatggtcatggtcatgatgatgacagtgctgacactggtggtggtgttgggatggtgatggttatgatggtgatggcagtgctgacactggtggtggcggtggtggtggtagtcttatcatggtgatggccatgatgttgatgacagtgctgatgctggtggtggcggtgatggttatggtcatgatggtgacaacagtgttgacactggtggtggtggtgatggtgatggtatgactgacactagtggtggtgatggtcatggtcatgacggtgatggcagtgctgacactgtggtggtaatagtggtgatggtatagtcatggtcatgatgatgacagtgctgacactggtggtggtgttgggatggtgatggttatgatgttgatggcagtgctgacactggtggtggcagcggtggtggtggtggtggtagtcatatcatggtgatggtcatgatgttgatgacagtgctgatggtggtggtggtggtgatggttatggtcatgatgttgatgacagtgctgatgctggtggtggcggtgatggttatggtcatgatgttgatgacagtgctgatggtggtggcagtgatggttatggtcatgatgttgatgacagtgctgatgctggtggtggtggtgatggtgatggtatgactgacactagtggtggtgatggtcatggtcatgagggtgagggcagtgctgacgctgtggtggtcatggtggtgatggtatggtgatggtcatgatggtgatgacagtgctgacactggtggtcatggtggtgatggtcatggttgtgatggtgatggcagtgctgacactggtagtggtggtggtgctgatggtatggtgatggtcacgatggtgatgacagtgctgacactggtggtggtgatgataatggaggtgatgatagtgatgatggtgataatgatttggatagtcataatggtaatggtaatgactggtgacagtagtggtattggtggtggtgatgatggtgataatggtaatgatagtgatggtgatagtcatgatggtgatgggtgtagtgggggtgatgaagacggtgatgtggtagcagtggtgacaatggtgacagtggtggtagtgatgatgatggtggcagtgatgggacagtagtggtggtggcaatgagtgaagccctggcagagtcagtggaacgatccctcagtcctgctctacctttcagtgaattcacgctctgccccacacacctcatggctctcagctcctcctgcttctcttgttcttcctacatctgagcttctgctatccccacttttttttttttttttccttctggagcctggcaaccttggtccagcctctgagccctggcattgtctattctgtctggaggcttctcatccacacctccccctggctgtctccttttttagtcagtttgcagctcacactgtgccctggagaggccccagtggccccagcatggtctctgccttcatgggctggtgttgcctggtggctgctttagcttctttagggcttgtgtggccatccccttctccagaaggttggtcctgtgggagtatcgctttatcccagtttttggtccatgctggtcaaacacaaagttgccagtgagaaccctgactcagagctttgtgttcacttgtggggttgggtcagtgtttgggtggctgttggatcccagccaggaatgggcatgatggagcaatggtgagaggaccccaaccccggggttcccacctgatcacactgcagttcttcactggtcacgtattggtattgtgtagggagccaggggtgcctgcgccccccaggactccagtgttggccattcaccaagctctcggaggattcccacagcagctgaggccaggaaccagtgcctaggatgggggacgctcacaaccagtgcaagagaagtggcccagggagggatggagagcgggagggacatggtgaggacaccatagatgcgggctgacaaggctgacctgtggtccagggaccctgtcttcaccctgtgaagaacaacacagtgatttatgttttcatgtctcttcctgtggttgtccttaaagtaccaggagttaggccgggatctgggaggcagaaatgattcccccaggctcacatgagcgcttcgcagcccgagttaaggacttctcagaaggcagctccttgaacccacacaccaccccagggcaggaaaagggagacagagcctgtgacccacagaaggtcacaccacagtacctgataaagctccgcaagctgaccccagggccgcaggtacccccacacctgggacctcacactccaggaaccaatggcagagtgatgggttgctgggtgtctcgaggcccaagcagaggctgacagtggggcctgggaccatgcattgtcaatcagtggatattatcccttagtagaaattcaataaatatttgttaaatgaatgtgcaaggtgtaaaactcaaggagaaaggctgttaacagggagcgctttgccctcggctagcacataataaacactgaatagccaggtgcccactgtcggacttttcattggtgcctctgctcccttcctaaggaagggaaacctgcaatcaatatgagcagctcatcctgacagcagaattttgtagcagaaaaaggctgctctgtctctttaaggaatgcaggtatgcccaggtgatctgagggtgagaccagcttctctcagctgggccccagaaaccttgatgcctggcctcattggagaaactggggaggtttggatcccagttttgcccaaccaaaggtgggcagtagggggccccagagcccccggcctcacctgccgctggaagcagcctcattttacaagggtccatgtttggggataagggccttgggccaggaggtggtctgctgaggctgcaaaggccaggccgccctgtccaggtatgcacggaggcgtccctaagtggtgaggtggcacccataggaggaaacatgttgagtgggtgtcctaggaacccttgaggggctgcagacctggctggctgttctgcagagaaggggctcatggtgggaaagggagccgtgtgtgttgaacttggcttcagggtggcagcaggcctctcgagagctgggggcttgagaaggtcatccatgggtgtatctggctcgatgcatggccccagctgttctgtgattgttgctgtgaatgatattactgttattccctggtggctctcttgccagcacgggctctctgctttggctccatcagcccctgttagggcagacccctctccctgggctgccctgtcgacagtatcctgctcccatctaagccgcctgtttccagggccattaccagggagaatttgctgaagaccaggttcctaatacaggacttggttgcatttgtagaaacactgatctaaatttgaacctctaaaatgaatgttggaacctccccttcccccaattttacacaaattattttaaagagaatattgataatctaggaagccatttttttttaaaaaaaatgcaaaatccctaagtctggaatttcaggtgcatcagcaagaaagacagcaaggaagacagccttatgcgttccctgcaattaaaaagggtattaagaaaatcaaagcttcgcagacactgtctcttaattgtcagttgtgcagggttaatgaactgcattagttcactgaaaaataacatattgactgtcagaacctgccacagcagcagtgaggagcctctgtagaatacctttgtaggaaattaaaagtgactcggcttccgctggaaggaagagactgagggggcctgctcagagggttctttctgaatgagtgggttcaagcaagggtgatgtgacttactcctgagtccaggcacggatgcctgggaaatgcaacgggacccacgtgggagtgggaggggaggtggcccgcaacgggggagtgaggggcgattacatttttcctgaactgttactctctggaatttgtgcctgtcctcctgtgttatttccacatttgtgaggttgttcacttaacctgtgcgctgacctggaattgtccccaacggagacgcatgatgtttgcaggggaatctcactgaacaagcaccgtgtctctttacacttgactagcaagtgatgagagagagacattattcagtgctttgctgcccaaagctctggagtgccgtgtgcattcccagggccacatgaagcccagtggcaaagtccatgaaacatgaagatgcccattaaagatggagttgacaaaaggagtcccacttttagtcctcccagatcaggttccagcacagcactcgcgtgcacttaaaattactacacggcagtaaggcttcttgacaagaaagttgtcaagggtggatggtagctggattaatgaataaatccaaaattaacccaggactggaagcactgtggctttgcaaacctggcagatggaatgcatggtaagaagggtatttgaaccgccatctcccagccttgccaaaatcttgttacaggtttgaattttctgcggaagttctgcctttatttcattggagttctcttgaagatgaaggatatcttaagatttcagtggtacaaacccaatgggactggcccttccctatctggggtgacctggtgcattgcatcctccatggggaagaattagtcaaagtagttgtggatcttcagaggtgtggaggagatttgtttatatgcaaacgatttttaatatgattacaatttattctcacctggtaaatcaagggggtgtagtaatcctgaggattcctgcatcatcttctgcctgtaccaaaaataacaaaatatcttaaaaactaagtcatcccataggcttcccaccactcactcagcttgtgcattgctcctgagcctccctcagccccctttgtgctcccagctgctcctccctctctgccatgcctgggaggacactcagctcattggggctcccccctctccctccttccctaggtttcatcctccatccttgtcattggcctgactttttcacaatcccaggtctgaatagatctcgtctttgctggaaatatttttgttgctctgaggaagatttacatcatcctcagtaaaatcctgccagaaaggagggaggtggacagtcagcagcatggggtgggcacctcacccgtcagtcttcaaaggggatgaagcaggagggtaaggatcagagcaggtggtgaaatggtttgactgtgtcctcatctaaatctcaccttgaattgtaataattccccatgtgtcaaggacagaaccaggtggaaataattgaataatgggggtggtttccaccatactgttctcatggcagtgaataagtctcatgaggtctgacggttttttaaatgggagtctccctgcacaaactctctcttgcctgctgccatgtaagatgtgcctttgctctttcttcgtcttcctccgtgattgtgaggcctccccagtcacgtggaactgtgagtccattaaacctcttccctttataaattgcccagtttctggtatgtctttattagcagcattagaacagaataatacaggtgggcaccggggcaggagtaggcaggcaaagccccaaagtaacagcaacaaaggaagaaaatccaggcagatctctacagaggaagagtgctctcaacatcaaaagaccaaagttcaaccaagtgaggtgaggccccatgtacaaaactgatgagacttttcacacaaagatgcctaggactctaacccagcctcaggagtggactcagaatcctgggaatcaggatctgtccacaccatgcatgcttccactgcaccattgtgcagggcactgtggttccccacccaatcagtcaggagtgaagacaatggcttcaaatgtgcataggtgggtcctggaggagagggcggagggtctcatgttgaatcccatcctatgtaagccacagcaccagagctgtaaaagaaaaactgcaccagggcagtcaaatggtccggaaagactttattcaagactcttgcaacaggggagagagactgaactcaactccactgaaacaaaaggcgggagggatattcagcactgggtgagctggcagaaaggacaggaggatgctaaggaaggtggtttgtgattaggccatcaggggatcagggaggtcaggggcaatggtcaggaagaaacctatcaagtgtagtcacactgagcagaacattgaggctgtcttggccccagggaaatgacaaaggaagggtttgaacttatacctctcttacagtagctcctggctaatgaccctctcctcagcagttcaggtgcataataatgcagtcactgcccataagcttatggttcaggtagaattagtggagttagggtttttcttctgttaaacttgttggtttgcaatgtatcactttctaggaaacttggcacgttggggctctggctggtgttgagaagaaggtgctgggggctgggcaaaccctgctgctacagatgcagagagggatacaaaaggaaggccacagtattacctttaaaagaaaaatcccaataagtttatttccaggtacagttattatggatgtaatcctattaacctgcattttgaatccagattgaacataaagagtgagtgtttggagtctgttctaggctatgactgggtggtaggagacaagaagttaacgctgctactacaattcagttgagaaatgacagtccaatgcccggctatagaccagaatagcttcgtttatcattacctctgagggccctgcctgctgatgggatgagacatcatcttgcttttgcacgcagcacttggtccctgagtagtgactaatactagagaaggttaattgatttgggcaattttggacacagatgttctccctggatcctttgagttgaggctagagcagccagttggactgtgaggtctctgggatccggtcctattaacagcctggtaactaacataggtgtctctgctgttctaggactgagacacactagcagagcccaggtcccctcctgagcaagagtgggcgctcctgccagcatccactggggggtggagggacagggctcgccatccactgtggacttggagctgttaccaaactaattttcactgagaacaaagaagccggcttcaaaactgagagcccagtgagaagaatggctctttttatccaggtcatgcattttacattttccctgtttaataagctaaaagtctgaaaatgccaaatttggatcttttattaagtaggccctaaaagtgcacacaggtctacaaaagtgtgtgcaggtcttatatgccttcacatttaaaagatgtgtttgaacatcccaggtgaccgtccacagggactttgatctggcatacagaatgctggaagggcaaggtattgtgtatctttctgtccctctgggaacaaggaagggatctgccagagaacttgctggagagatggcattttgattatatgagaatagctaacctgctgctttccagtttttagcatagcatccaggaagaatgggatttttgttggaattatgcattttaaaaaaaagctttccagggaggtatgataatgggggaggaaggagtggatattgaacctgggattttttttttttaacttctccaattctcctctcttttcacacacgtgaaatgttttctagcaagtttctagcatatgtatttacccgtgatagtcaagttgtacttttattatcttaaaaagattgttcttggtgtggtgaggctctgcaggagggacagtgcctagcacctctctgtaaattgtatggatgtattgattttatgtagagacggccaaatgcatccgaagggaattgcatcttggtggacatatgtttgaactgttgtcagtaatgaaggtaaatggctatattttaattttgaatctttatctcctggtttttgttgttgtcaatccttgccaataattttgaacttgatcttcatttgtgggcaagtttcatgcttgcaaaggttgctttcaattttgaccctatggaattgttagaaatcataaaccagaagaatcgattcctgaatcttttgtattattttatagggtgtaaataggacttttttttctttttttttttttgcagggtggcaggaggatacagttttactttctaatgttctctataggccagtttccaaattactctgcctgccacgggttcacaaatcaagaaaccatcttgtttagaatggccaggcaatgagattaaatttcctcttggacattctttaattttgagaatgcatcaacatttagctcaccacgtggattgcatagaatgtgttcctgtgcacccaaggagatgtggatttccatttatttctcactgtggctgcccttgtaccacaacagccagctgaaaatggaaaggtttagtcaggaatttacaaagaaccaagcagagtctctttttagatatgcccaagcatcagactgtttgattcaaatgttttttaagcttctctccagatgtttgacaatatgtgagcacagctggtttgtcttcaccaagataggcggctttgctgcagtcctgttagagaatgttttctcttaacatgctaagaaggaaaaagggctggacccccattgtaataagatcgtgcatagcaggtgcatcatatgactaaaagaagaaatacataacacgtgactcagtacaatcccagaattaccatctgggactgacaaacttgtttctcatgtaagaggttgcagcaccctcattttggttctggtgcattaagaattcattctttcctggctgggcacggtggttcatgcctataatcttagcactttggaaggccatggtgggtgaatgacttgaggccgggagttcaagatcagcctgggcaacatggcaaaactctgcccctacctatacaaaagtattaaaaaaatagctgggcatggtggcatgcatctgtagttccagctaatcaggacgctgaggcgggaggatcacttgaacctgggaggcagaggttgcattgagccaagaacgcaccactgcactccagcctgggtgacaaagtgagacgctgcctcaaataaataaataacaaataatcagtcctctccttgcaagtaagactgagggcgggggtgggggcaaccaaactgtaattcttaatagttgctaaaagcattggttcatctaaaattactatcttggcctctttctgacccaccaaagcagtggtgttctcactggttttaatatttgccattttatgtgtgttcactgtgagccaggatttttaataaaccattgcaaacattatttcagttagttcctgtaaactactgatgaggaagtttgaaatcatctctatttcacagatgaagaagctggcttcagagtgggagtttcctcacatacagtcacagacctcattagtacagattctcaaagccatcacctgcttccttaaatcaagcctacatcaaataagtaaatagcaatgaagaaagtcttccacatttcaattcaccacaatgacatttgttaatcacttactacatatcagcgttccatttgggttggttctttttgaaatgttctgtagaagcatctgattctcagcactctgaattattttgggtactctgtggtcgtttctctgaaacatgtgtcttgagtatgataagtaatagaatattttggcagtacaataggcatggtggcttacacctgtaatcccagcactttgggaggccaaggccgaaggatctccttgaggccaggggtttgagaaataatatgtccccttccatccctgcctccactatttatgctaccattaacaaattctacataacataattacacatgctgctgcccacaaagagcaggagaccttcttattcatgaagactctgtggttcttaatcagtgatgctttttccatatccatcatctttatggtttatgtggaggtggacaactacaaagttagaggggacattcttgaagaccaccctcactgctgacaccaatttcaagttcacagattccccaaaccacccttggattcgataattctctaggaggactcacagagctcactgaaagctgttatactcatggttaccatttattacagggaaaggaccccagttagaatccgccgagggaagaagtggcacagggtggtgtcagaagggcaccaaacatggagtttctgttgtcttctccccatggaatcaagaaagtgttattctcccagcacagggtgtggcagtgtatgtggaatgttgccagtgaaggaggctcactagagcctccatgtccagagtctttatttgggactccatcacctaggggtgattgattgcccatgtggctgacccaagtctcaaatctccagcccttctgggagccaactgattctgtatgacccaaacctccaccccatatcacattgttactatccagctggcccaaggtgcccagggaaagaaatacactgccatcaggaatgacattccaaggacttagaaatggcctctcccagggccaaaggcaagagccagacctctctttgggtaaggttaaattctttctctttctctttctttctttggctttttaacatttttttattttttatttttctggatacatagaaggtatatatatttttgggatacatgagatattttgatttagatatgcagtgtgtaatagtcacaggtaaataaggtatccatcacctcaagcatttatcttttgtattccaaacaatccagttacattcttttagttattttaaaatacacaattaaattattgttgactacagtcaccctgctgtgctatgaaatagtaggtcttactcattctaactacttttttgtacccattaaccatccccactcccccctgccagcctgtactgcccttctcatccatccttctactagtaaccattcttctactctctatctccatgagttgaattgtttgaatgtttaactcccagaaataagtgagaacatgcaatatttatctctctgtgcctggtttatttcacttaacataatgatctccagttctatccatcttatttcagatgacaggatctcattcttttttatggctgaataatactccatcgtgtataggtaccacattttctttgtccactcatctgttgatggacatttaggttgcttccaaattttgactgttgggaatagtgctacaagaaacatggtagcaaagatgtctctttgatttcctttcttttgggtatatacctagcagtgggattgctgcatcatgtggtagccctatttttagtttttttgaggaacccccaagcagttctccatagtgggtgtactaatttacattcccacccacagtgtatgagggttccctttctccacatcctcaccagcatttgttattgcctgtcttttggacttttggataaaatccattttaactgggatgaaatgatatctcattgtagtttagatttgcatttctgtgatgagcagtgatactgagcacatttccatatatctgtttgccatttgtacatcatcttttgagaaatgtctattcagacctttgcccatttaaaaaaccagattattagattctttcctatagagttgtttgagccctttatatattctggttactaatcccttgtcaggtgagtagtttgcacatattttctcccattctgtgggttgtctgttcactttgttgattgtttcctttgctgtgtggaagctttttaacttgatgtaatcttatttgtccatttttgctttagttgcctgtgcttgtgggtgttattcaagaaatctttgcccagtccagtgtcttggaaagtttccccaatgttttcttttaataatttcatggtttgaggtcttagatttaagtctttaatctattttgatttgatttctgtatatggcaagagatagggatctggttctattcttctgcatatggatatccagttttcccagcaccatttattgaagagacagtcttttccccagtttacgttcttggtgcctttgtcgaaaatgtgttcactgaaggtatgtggatttgtttctgggttatctcttctgttccattggcttatgtgtctgtttttatgccagtaccatgctaatttggttactatagctttgtagtatgatttgaagtcaagcaatgtaattcttccagttttgttctttttgctcaggagagctttggctattctgggtcttttgtggttctatatacattttaggattattttttctgtttctgtgaagaatgtcattggtattttcataggggttgcattgaatccatagattgctttggaaagtatggacactttaatgtatttattcttctaatccagagacatggaacatcttttcttttttgtggcctcttttttcatcaatggcttatagttgttattatagatcttttacttctttggtgttaattcttaggtgttttataactattgtaaatggaattactttctagatttctatttcagattgttcactgttgacatatagaaatgctactaatttttgcatgttgattttgtatcctgcaacttcactgaatttatttatctgttgtaatcattttttgttggaatctttaggtttttccaagtataagatcatatcatctgcaaacaagtataattcaacttcttccttttcaatttggttgctctttctttctcttgtctaattgctgtagctaagacttctagtactctgttgaataagagtagtgacagtgggattcctcatcatgttccagatcttggaggaaaggctttcagttttttttctcattcagtatgacactggcagtgagtctgtcatatatggcttttactatattgaggtatgtttcttatataccaagtgtttatgagcatttttcttaatcatgaagggatgttggtttttatcaattgctttttcagcatcaactgaaatgatcatatggtttttgtccttcattctgttgatatatcagattgattgattcatgtatgttgaaccatcttcgcatccctgggataaataccacttgatcatgatgaattatctttttaatgtgctgttgaaattggtttgctagtattttgttgaggatttttgcattaatattcatcagggatattggtttgtaggctttctttttttgatgtatctttgtctgggtgtggtattagggtaatactggcctcacataatgagtttggaagtatcccctcctcctctatttttcagaatcttttaagtaggattgatattagttctttaaatatttggtaaaattcagcagtgaagccagtgggtcctgggcttttctttgctggctttttagtatggctttgatcttattactcattattggtctgttaagattttcttcatgattaaatattggtaggttgcatatgtctaggaatttatacctttcctctatattttccaacttattgtcatacagttgctcatagtagccactaatgatcctttgcgtttctgtgttatcagttgcaatgtctcttttttcatctctgattgtatttatttgggtcttctctcttttttttctcaatctagctaaaggtttgtcaattgtgtttatcttttttaaaacccagctttcatttcattgattttttttgtattttttttcaattttatttatttttgttctgatttttattatttcttctactaatttttggtttggtttgttcttgcttttctagctctttaagatgcattgttaggttgtttaaagtttttctactttgttgatataggtgcttatagctataaacttccctcttagtactacttttgctgtgttccgtaggttttgccatgttttgtttccattataatgtttcaagaaatttttcaatttccttcttaatttcttcattgcccactggagcattattcaggagcctagtgtttaatttccatgtgtttgtatagtttccaaaattcctcttttattgatttctagttttccattgtggtcagatacttgatattatttaaattttttaaatgttttaagatttgtttttgtgaccttgttttatcatctgtccttgaggatgatttatgttatgaagagaagaatgtgtattctgcagccattggatgatacgttctgtaaatatcgattaggtccattttgtctgtactgcagattaactctgacatttctgtgtttactttctgtctggaagatccatccaatgctgaaagtgggctgttgaagtcttcagctattattgtattgaggtctctctctctctttacctctgataatatttgctttagatatctgggtgatcccttgttgggcgcatatgtatttataattgttacagctgcttgctgaattgaccgctttatcaccatgcaatgacctcctttgtctcttcttatactttttgtcttgaaatctattttgtctgatataagtgtagctactcttgctcttttggtttccattgacatggaatatctttttccattctgaattattgacaagtaaagacttactcctgccattttattatgtgctttatggttgttttgtggtctcttcttttccttctttagttgctttctgtcttcattttggtgaaggtgatttcctctgatgatatgtttcaatttcttgcttttcattttttttgttcatccattgtatgttttttgatttgaggctaccatgaggttttcaaataataccttataacccactattttaaactgatgacaacttaacactgattgtacaaacaaattgtctacctcacagcttgactgtcagaatgaagtttgaataactgcatagttttgatttttgccacttcttgggagacatcattattaatttagttttttgtgagttgttctgctaactacaacatttgattattacttttttcagcaaataatactgctgaatgtatgtagaattttacacaggcctgctttttagtcaaatatgaatcatctattctcattttgctaaaaaagaggcttaaccaaccctccacaaaattagattatatggtaaaacttgtttttacctaatgctctttcaattaaaaactgttatatgaagttggtggactatacccaaccgggtgtgggtaggctgtactctggtggggcaggggaggggaggggattgagccctgattcctagtctttgccaattgccatggtgtaattttgtgatctatttcaagctaccaacattacatcatcgaatgtggagtttgggaagagatgaaaatagcacattgtaatatttctatctctcagatataataggtcaaaataacctctttagcatagataagaataaggtggtaaaataattctgaagtgagaaattatgagtattcctcacttttatcttaatatgatgtattaattacagttttctacaggttagtttttctctgtggctatgtttaacaacaagcaggcaaatttctggatccttaacagcaggctctggtgagtctgcaggagcctgctgcagctcagttggctgtaccccacctaagaagctgtggctagagagcttacgagcccctccaatggagagctgcatatcatcctgttttatctcagccagcacattgttttctccaatgctgggtcttcctttccaaaacagcctatttaaggagctcacattttaaccaatagaaccataatttaactcgtaagcagaaggttgaatttcatttaggagtttgcttatagttctgggttctgtgatcttgtaataaaatatgctatggagaataaagtccaccatgtctgtatgattttgttaaagtgactttaataagttgatgagtgcggaatggcatgcacacatacacacacacagacacgcagacacacagacacacaaagacacacacacactcagacactcacagacgcacacagacactcagacagacacacagagacactcagacactcacatacccctcctctttttacagccatgtcaagatagaagggtgattttggtgatcagctgtggatgaatagccaggtataaatcttgtttccttccctgtttcactgtatactaattaatatatggtgcttcttacttgattctactgtaaggaaaacaccgtgggattgtagatgactctggcttactgtaaagatccaggctgttctgctgacagccacagatgatgagtttaaacttcttccactctctggattttagaaaacatccactcgatgaggtattcttttgtcatggaataggacttttttttttttttttttttttttttgagatggagtctgactctgttgcccaggctggagtgcagtggcgcaatcttggctcactgcaacccccacctccctggttcaagcaatttccctgcctcagcctcccgagtagctgggattacaggcgtgcaccaccacacccagctaatttttttttttttttttttgtatttttagcagagatggggtttcaccatgttggccagactggtctaaaactcctgacctcaggcaatccgctcacctcggcctcccaaagtgctgggattacagtcacgagccactgcaccggccagaatagtacattattattgctgttatttgatacaaaagaaatgtagtaccttcggggtagtaaatatcattgattcatgtgggcttgaagagatgctgtaatattttttagattattaagaaggctctacttaaacaggtgattttttataatcattgtgccatgggtgacttgagttaagcaaccagaccctttctttaaaatgtaattacaattgctttcaacattcttttttttaaaaaaaaaattcttttttctcctttttccatttttgatacttccaagggcatttttatatgttctattaaggaaatccctgctgtggcagatgctagcagcaaatactctagagctgtctgttgtttctgccttggatgagattttatagcattattgagcatttcagaacattatatcagaagtgcacgctgcagagtttggttgtaaacttaaggtttccattgccattttagaaacctgcttcctaacataatttactttcagtatctgaaaatattaaaagacccaaagcaaataaaacaagagcagtatctattcagttttgatttgtgatgccttttgattatggcgatcccacataattaataatgtgctttatttgagaatcctgcattatataagctagctatgaaagtcactgtacaaaagggggcatgtgttacacttttttccccataattactctgagcactgtaccaaaaagcactaatagaaatgtggcgtctgttgacttcatatctggagaataaaatcagccaaaccacaggggtggaattaagaagtgaccccttctaccaaccccagccccctccaacttagtttccttcaaatgcccagacatgaaattctgatccagcaaaaatgacaatgtctagaaatctgactgttctgaactagaatcctcagtgaccctgcctccagcctcctccaccactttctcccccatggaatttacctccccccctctctctccctcctctccctccccctctctacctcccctccctcctctccctctctctctctccccctgcccgcccctccctctctccctgccccccctccctctctctctctctccccctgcccgcccctccctctctccctgctcctccctccctctctgtctctctccttgcccctcctcactcacccgcctcccctctctctcttcctctctctctccacctctcttctccctaccccacaactgtggactctgagacataggatctgagcttcatggcttaaggtaaaccttattcctgtcttcatggcaatctaaaaatattcatgtaattgctggttgatcacgaactacaaatgaacaccacttgtgagataaattcagtgtgtttttatactaattctgaaagaaagctttcttgcacagtatggttttgcatctgcccatgagtgttgcagccaaaggcagaattccagctaatgccggaattagcttcaggaatgtcacaagttctaggccagagtgagtctctagaacaccagaagagatctgcacgtggtcaccactagaccagtcctattggacgcacaggaataacagtagtggtgacataagccacgagcttaatgcaggttaatgaggacacgcggtggttctcctgttggaatactaatcagattgaaaatcaaccacatcattttcacactgattcaagttttaattttattggagtttccttgagttcttaccccacaaatattttggtaatttcagtcctgcgttaagctctgaactaagcccctggaaagtgaggaggcatgcgccctggttcctgtcctcggtagacggaagtcaaagccaacgtttgcaggacatttcctgcctgccagactcatctagaagtgtgtgtgcccgtgtgtgtgcacgtgtgtgtgttctgaacatgtgtggtctgaacatatgtattttttctaaacgtagacacaacacataacacacatttatatccatatgtatcagtttaatcctcacaacagtgctatggggtaggttgtacctccacattacagccctggaacctggggctggagagttgaaggaaggcccccggtgagacacaggtggagagtgggagcatcagccgccacacctggcttcagagctgctcgccccaccttcagtccttctgtgtagctgaagagctctgcaattaagtgttaggctgggcgagaccagccagtgattttcacactattacctttatcgctgtaaacttttctcaagcaaaacagtgttcctgaatatggttgaaaggacatggctggggacaggatgtctgtgcatggatcccaggaatactgacacaggctgctccatggtctgtctgggccactgaggtgggatgtgtccaagtccagtcaggtggacaggatcacacctggtactgttatagaagagttgagtgcaggaatctgggtttaggtgttagaagaccacagaagccccgggagagacagagaggccagccagaggtgacaaaggcagacaggggcttctgtcagctcaagggaaagagccaggggccggggctgcctgcaggggccagggaggacgtgtggacactgcaggggatgcagcctgaggccaagagatggggagagatgcctggtccctgcctccccacgcctctgcctgccagcggaatcctgtgggcagggaagccacgcagtgtgcgtggagggccagctccttgcaccatggtccggggcaggaggggtcctatggccaatgggcaaatgcagtgcaagggggcagcaagaagctccagccagatttcattacgatggtggagacatggtccgggccccatggggttaggcgtggaaacgagtgaggaattacgatgatggtcaggaacatagctgggccaaaggcaggtattgtcaagatggcagacctgtgcccgtgtacagggagcagaggaaccagcagaaacgaagtctcatgatgggtagctgcagggatgcatgccaatccaggccaggactggaagacagaagagatgagggctgtgctttctgcggagcgtggaagaaggtccacataggtccacatcccgccttccttgagctcagtctgctcccagctggcgcctctgcatcctgcggttgacacacagtgaacctgcttatcaaagccgtggtcctcccacaggagcccattcctggggcagctttctctccttccagcccattgctcataaaagagatggtgtgtcttttccctgagggagaatgacctcctcttggaacagctcatgtgtctttccccgagggagaatgacctcctcttggaacagctcatgatcccgttgctgggtgaatgctttaaaaggtagtgttctcaagcagaaccttctcattctgtagaaggtttcatgagctgagaaatcatccctctctctctccgtcttacacacagacatagagcttttgttgtggaaagtaagacaccaacatagtttatgagatgtaaatataacttcggtaagatgggagtctgaagctgtctaatcgcgtgaggactgacattcccttcagtctactggcagggatcggagctgctcagagtccaaaaatatgcctctaaattgggaactgtgaaaacgccaccccacacaacaaagacaggactcccctaaagggttccagatgctacctgccctgctggcccgtgagcgtggagtgtgcagcagagcgagaaggcaggaagaggaggtgctaggagctgtcatctctgccagaacggacatgatcaggagtcctgggcagcaccaggaggcccgtctctagcagcaatgggtgtgtatcctcataactggctccgaagtagcacctggctaggggacagtggtttacttgtggagcaatgaggtttctgctgagcgtgacgtaagtttggacataaaatagatctagttcagatgtttgaccagtcagggccaactctgcttgtcttccaacagagaacacatgtgtgtccagtgtagcacatctgtgcatgttactattgtccaccatggtgtgaacgtgccctccatgtgtagattaacctctagggcatttatgagtgcctgatgtgtgttgggcatcatgtcttgatctgggggaatatgtgttgtggttctacaggtctaccaaggagtcgaagcccggcgtgtagcagacataacagcaagagatcacggtgacgtgaaaaatgcagaagacctagaaactatgtttcattcaccattttctagagatgaaagttgaaaatcacccttttgtagttagcgtttctggtgctggccattcgttcgtgtgggcacctgcttctgtctggctgtatcaccctctgcctgggggcatcttaaacatcctggccatgcaggtttgcctgcgagcgattctaacagcttttctatgtcagagaaactttcttttgccatttttgaaattttttttttttttggctggatcttgaattttaggctgaaggggtgtgtgtttgtatgttttctttcagtgctttaaaaatatggccacgtggtcttctggcttgcatcatttctgagaggaaatctgttgtggctcttatctttgttcctccgtatgcaatgtgtgttctctcctggctgcgtttaagattttctcttgatcactggttttttgttttttgtttttttgttttatgcaagggtgtttttttttaaatactttaagttctagggtacatgtgcacaacatgcaggtttgttacatatgtatacatgtgccatgttggtgtgctgcacccattaactcgtcacttaacattaggtatatctcctaatgctatccctccccccttcccccaccccacaacaggccccggtgtgtgatattccccttcctgtgtccatgtgttctcattgttcaattcccacctatgagtgagaacatgcggtgtttggttttttgtccttgcgatagtttgctgctataaagacacatgcacacgtatgtttattgtggcactattcacaatagcaaagacttggaaccaacccaaatgtccaacaatgatagactggattaagaaaatgtggcacatatataccatggaatactatgcagccataaaaaagctgatcactggttttaagcaacttgattctaagtgggcttggtctagttttcttcatgttttatttggttctttggggtttgctgagcttcttggatctttggatctgtagttctcatgagactgggaaaatcgtggtcatgattccatggcttttgtcactctgcccccacctcctttgggaaccctaatgactgtgtaacaggctactcagggtcgccccatagctcgctgattctggccatttctgtttttgataattatgttttctccggctgtttcattttagatactttatcttcaagttcattttctttttcttctgcagtgtcccatctgctatgaatcacattctgtgtatttttcatttcagaccttatagttttcatctatagaagtctgattcgggacatcttttgtgtcttgatctgtcgatgttttcttctgcattcttcaacaaatacgggatataggaatggtaactttttaatgttcttggctaattctgtcatcctgatatattttattgattgctttttattctcatgggccctattttttccccaacagactcccaatccatctcttccaccccaggaggaccccaggctccccctctcgtggtagcctggaaactccccaagcggaagccggggcagctgtggcgccccctggctgtgtcctctgcttgggccactgccctgtgccactgcctcagcaccattgtctgtctattttgtttgggtttcccgttgttccaaggtgggtggtggatacacagtccctgccacgccatctctgggaagcctcctttccctcttcgtccaggttttatcaaagtgcccgatgagacatgttccctgaggaacccaggcagaactggaccctgcaggagccaggcccctcccttcccagtggcagcgaatccccgtcctgaccggggcctggtggctggctgcctgctaggctgacacaggggaaggaggtgtggaggtgtggggagggcggggctgagccagggcaggtgagcatctccccaagagcactgtgtgggcatccgggttgtgccctggtaaggcgttggaacggctgaggcctgtggcctgatgttgcattatcattccaccaaaagaggtcacgagactagaattgtgatccagtttccacacctgctggttgtttgaagttaagaagttcatgccccatctttgaactgcagtttgttggctgtgcattaggtctgctcctacatgcattgccctcacatggatttgtgcgaccaagattatacaactcggatgctactgtttataaagtgtgtccacgttgatgattctgcttggtagtcagatgacatccatgagaggcgttctcagtcagcttcatttctgttctatggactgaagtgtacccggttaagaactttgccaaagctgtcactctaggcagtgaccatccttggtctagaactcaagtctcccagtgacaaatcctctttccttttctctacacatcttgttctcaactgcagtttcaccccccagggaacacgtggtagggtctggagccatattattgccacagctggggcgtgggggagggagatgcttttggaattgagggacggaggccagggacgctggtgaacgtcctgcaacacccaggacaaccccccaacaacacaatttcctggtcccacacattggggaacagagttgcagctgggaactcctggtctgcacttgtctgagaaaatacttggaaggccatgaagggccattgcaaataaaatctcagcgtagggcatgattgtgccttgctgttacagcccaggctttatttctgttgtcaagtctaaaggggaatgcatctctaaatcccttatgtcatctgtgcaaccatatagttgaatttaccatcatgttctttcagccatttcttccagatacatacagtaaacatttctttagagggtgtgcaagctttgaggaagcaaaaaatgatatttcacagagtgcaggctccttgctagagcacaagtttgagctaaaaaatgctggctgcaagcacacacggtatggatacaaatgggggttaaaaatgcaataacaattcaaaagaatcgtagtttgtctctcattctgtttgtgccgttatgtatataagagaacatctttccaggaaccaaactgcctcagcaaatggttttcaaatacagtaaaatgctcataaatttttacttataaaatattcccccatagcatatgtttttcagttccatacatatcgatgacttttccatacatatcgatgactttgtatgtctcatccatggtgattttgtttctctgtccctcccactctcaaggttcagctagctgatcccgtgcaaaaggtctgcagcttcatttttcagcaaaatgggccctgttgctattgagaactgagaccttagaatcccgctttgctctgggcccattgctctcacgtattattcaagttgctgaaattctctgcttgccacattttctgcaaagtgcagattaatggaggcacggttctgtagggcccggaagaagccagaagttatcagagctctggccacggagggatcctggcatgaattcctgcaaacattgctcaagatgtttgtacgtgtctgcccagactgcatttcttttattcataaggtaattcttatgaaaataattggtccattttaaccacacagatctttctggcacacactgccagcaatcagagtggcttcatttagtacattcaggtgccaggaagggtgaggtcgctgttttctctcttgtggccccacccaagtcctgttaaacttgagcggaggcctggacgcgcctgtgcagcaggttggccctcttttactgtgggtggagcctgagacctagttctgttcatggtaggtttcctggctgggactggttttttgcccttcctctcctacccctgttctgctgcaccgcttctgctgacagggctgggttttactcagctgactcgccccatgtggttggatgctcctggaacagtcatgtgaccagaaccagccaatcactgtgcttcatccacctggcctagctgtctgtagagatgggcaatgagccgagttgttgatggaatgacactaagcaacagcagccgccgatggagcacctgccacatgccaggcctggtcctccactgtattcaggttaactgagtgaatccgcacgtccgccctgtgtggtacctcatgccatcagcatccccattttacagatcaagaagccgaggcacaggacttagccaggtttgtgcagctggaagatggtagagccaggatttgataccaatgggtcagcccccagatctgctgctcttaactaccaggctgtgctaagtcaggatggtccgaaaccttcagctctgctgctgtgaaaacttttcagagggaagctttcttccccctggagctgctgagcccagagctgtgggagtccaggtagataggaacactagtggtagtgaagtaagacaagatgagtgatgaaaagagagagtgcttgagctacccttgagaggagagagagtggtttagcacctggatccagctggacctgaaagaggagaatcccagacataactctcccccttcaacgttcagctgggcccagtttgatctgtgtttgtggcttttctaccaaactttcctgttctaataacccaagctcaaaaccatgggagtcatcagtgtctcccttgagttcagtcctcatgtcgattgcttgaagagacggttatggttacaagaattcatcccatgtctgtgcacgcccattgagcatgaaattgactcctcctcttctcagggatgggcttggccatggactttctttggctgacgagatgttagcaaacatactgtgagctgaggcctggatgcgcccttgcttcggggtggccctctttcactgtggttggagcctgagactgggatgagaaggaacctggtggagaggagcaccagcacccgccccccccgccccgcccccgctgcccccaacacacacacaaatagcctaagacctagtggatgcatgccctggagaaaccatgtgactgacaccttcccaggtgaccccaggcaagacttgcagaagaaccatgcagctgagctccgtcgaaattgctgacccacagatttatgaattttggaggggggtggttatgcagccaaagctaatgaaaagcttgtagtgtagttttatcttaccacgttttctttccctttcgctcctgtcccatctttctgatatactcatcacctcatggctggccacttgcagatgtgtctctcctttggccttgtgctcactccagatgctgctcttggtattttctctttgctctccgctggggacgcatcttcctaaagcatagccttcgtcaagtcctacttagttggccaggcttcagcagaccctactcacccctgggaagcagcatcacctgcctagaccatacctgaggtcccaacacccacacttaccacataatattttcccaccagcacctcccctcagaacaaaaacttgccaccatgccatgtacattcccacgttttattcttttgcgctttcatctccttcctgaaatgcaaatatgcactcttgtcttttctgaacttctgcccaccgcaacccccactttctccctaaagcctctgcagacaactttattgggcatttttactcctccagactctcatatctgcagtgccctcactgggcacgagctgcatcgctgtttctccagcctgccccactcttcatcaggcccgtttatcttctgctaatttgccaccttggatgctgagcaaccttacttggctttggtttcctttatcaccacaaccacgtgaagagcagccctggagccagtgccagcttcacgcagtcagtcaggaagaacgtggaccacgtttgggtggctcgcatttgctgggcgtgcaaggcctcgtgggcaccctggggagaaggtacctgtgtgctcatcggatccctaagaccagccagtggggaaagagctatcatgacccttcacacctgaacacagagggggctcagggggtgcgcccagcagcccagccaggatttgaacccgcatcatcacagtgttgagccaccttatccaggaccccacagccctcctcaggcttagctacaatgacaggggccaaaccctgtttccatctcatctgtttgcaaagcagattcaatatgttcagaggataaaggtgccagtgttttctcctggggctaggaagaaaagactattgggatgtacctgtgaatttcatatgcaagcattaatatggtcaccggctgcctggtaagaaataagaatttcatccctttccaacggcagcttcatttcgtgaaatgaattggcatgctgtgcttcattttgatgattttggcaaaggacttgggttcttcaaaattgaagtcagcacccctgttccattgcgagatgtgtttggcagccgtgagcttctaaagatctccccaatagagaattgtattccattaactttctaatataattatagggtgacagggagacctgcccaactttttgttattccaccctccaacgcttggctggatttggggtggctattgtggatcacagcaccacactctctccaagaacattccctattgtgaaagcatccctgcggaggaggctgcagttagcacaccagggccctccttcctctgtggatccaagcatgcacagagcccattcactctgccagggtggtgttgggtcccggagatgcacagctgaagaagatccagcccaggctcctaagggcaaccccagccaaggagagagctccacggtgctctgccagacgaggcccaggtgtgggcccaaggattgcagggtactggtggggagggtggctcattgacctcttctgcagcctcagtgaagctggttctccatggcgatgatggaggattctcctgactcttgtgcagaacaggaccactgcagggtgaatcagccctggccaggtaccactgcccatctggtgggccagacagctgtctgtgctgcagtgcccaggcacgggccctgtttctctcagcacttgccccatacgggtttctgtcgacatccagctccttggagcagcactgaattgcttcattcacacgtctacactccacgttcctctgatcctcccttggttggagagactcccaacacacgcacccactaattacaccacccccttgagtcgagaccaacaatctgatgagtgcatcagctccaaattattttactggattggggtgccagaatgccaggctatgccatctaacgtgagagaaatggggagcattggcccgcataggtgagccatgctttctttagacttccaggatatcacgagcccaaaaaattcataaaacacacaaaagaaactcagctaaaggcaaaatgtccaatgctgctgcattccttgtttcatccttccacaccgccatgctgtaagcaaaatacagcccagaaacctgcacagttctacaaacagatctgtgtgcacagcagccctgaagctcagcatcaggcttaggagctggagagtgatgggccagtgcccagcctgtgggtgggggctgtgcatgactggtagcattcacacatggacatcacagtcccaggacaggtcctgtgtccccgtggggccctaccctgttcctctcgcagtccgggaagcattgtcagatccaggctgcaggaggacaagactggctgtagctctgaacgctcatggctcagcaaagccagtgtccggcatgtgctggccttaggattttaaccatcgttggaaataaaacacttgtgtggtgccacctcagttaataatctgctttctaagatacaaattttaggccaggtacgatggctcatgcctgtaatcccagagttttggaagctgaggtgggaggttcgcttgagtctaggggttcgagactagcctgaacaacataaggagacctcacctcttaaaaaaaaaattaagtagccagttatggtagtatgtgcctgtagtcctagccacttaggaggctgaagcaggagtatcacttgggcccaggagttcaaggttccaatgaactatgattgcatcactgtactccatcctgggtgacagaaagagcctctgtctctaaaaaataataaaataataatgagataaaagttccagttccctggatatggtagatgcttgaagggaggtactgttttattctcgtgtgtacccagtggtgcctggcagaggaagggccctggagtcacagtcaaggtcagctagattttctcctatgttatcttccaggagttttataggtttgcattttacatttaggtctgtgatccattgtgagataatttttgggaagggtgtaaggtctaggtccagttttatttctgtgtatgtgaatgtccagttgtttcagcaccatttgtgaaaaagataatgctttctccattgaattgcctttgtcttttgccaaagatcagttgaccgtagttatgtgagtctgttctgcgggggaagggggcttcgtgggctggaagaagtgggaggcctgagagtgaaggattcctaaggaagtgaggggtgaggaatgaaatttgggtcaggattattggcctcggctcaccatgtgattgttaatgaatcattctcagcacaacttttaatttatttattggttctcataatggagcctccattcattctaataagtaccatgagcttcagcctctgaatacatgagaggagaattttagggaaatggccacagggagtttgtgtctcaacttgccctttaaacaactggagttgcagtgattttctgattctctgctatttccccattcctccctgaacaagcatcagaaggaaactaaatgcaatctgacaagacaacccttcagcaggttaatttgtactagaccctcaattttccagctagaaatctagcttgaaacactactactcaaacaacatctatcaaagcccaacatctgggtctcccagctgccaagttcaccccgtgaggacttgtcaacacgccagtctgcttcgtaattgaagtactattcaaagtgtcaaagtcttgtccgtggaaacagtctgcatatgcagttacaactaagtatgggttggaaaaaatacaaactgaggtcagctcttcctaataggagcatctaagcaatgtcttaagtcttcaagccacggttgtcatgatatctgtttgtcacccccagaggcaaatggaggcagttcaatcgatgattctgtgggaggagaagggcagaataacttaggcaaagacaatcactcagtgccatttatttgtcttgtatgacgccaatgatcatggccagtcttgacctagtgttagcagcagtgatctaacatcgccgaggaaggaatctactattgctgcatttcccacagctattattctgccctccaaaaggcaaagcacagagtaggtattgttctgacctccaaagagcaaagcacagggcagggtgaggtgactgtgaccagcggccacaacagagcttcctgcctttttaacggaacagaaccgtttttaatttttttaaaagatcattccacaataattcatttgttcagcgcctctgtaaacaaatgcttggagttcacacgggtcccctgtggaatgatccttctaagtagctttggctcaaaggcatcccacggtggtgattgctttaggattgtttccactggagtgaattatacttgaggtagaatttgtactgggctgatttgtcttaaattgcaggataagttctaaagtacaagaagtatgtactctataaaaaatgtcgtggggcctgactggtatcaagaggactgaacatggagagacaaaagagagagagagaaaaaaaatggggctctgcagctgccaatatttgatgcccttgttatcaagccataaggctgaaaatgcttttgataatgtttttagaactaagcatgctcctgtcggctgttctctgtgttccttgagtagtctctaaaagattggaagaatttgtgggtgcacctaaaacagtcaccatggaccttgccattcacagtatgtcctcagatcagccccatcagtgtggcctggaagctttttattatgtttaaagatgcaaagtcaggaagtcagtatgtctagccatcttaaatcactttttttttaaattcatccatcagtttggaaaaataatatattccattactttacacttcaatgcgttactgtgcaatgcactcattgatgactctgaaacacaaacaggacttcccagacctctgcttggaagctcctgggtattaagtctgggcaaccccatctcctcccagcctcactaacacgagtcgcctcttctcaggagaactgagaagagagctttgcatgtgacagctccaccctttccaagggggtcttcaattgcttgacagccattattctgttaagctcctgtgcctctcctgtttgagcagatagaaccaggttcagacccaggcacagcccagtgactattattgaacaaatgtattgggttggtgcaaaagtaattgtggtttttgccattacttgggtcagcattgtcaaatctacacctactctatggcccagtagtttctttcctggattttatccaaaagaaattaaagagatgcaagagaatgttcaaacctgcttttaatggccaaaccaaaatgacttttgcacccacctaatagtcgtgataaagtggcattaaactggaaatctaacttgacttgtcactcctccttccccagggggctgagccccgatgctaatgaccacagtcgaggatgagttgaaccctcagccagggttgattcagccgattggccagtcctgacgttaataacttgcacagacgctttgcacgcattaagcaatttcatcttctcagcagtcctaggaagatgttgctgccacgatcctcaattcataggttaagatactgatgcacagccattaactgacttgctttttgaactcagtttgagagcctcagagtccacatcctaaaccactgtgctggcctaccaggggcctccaaaagtacttctacatcagcattatttggggatgcttctgaaacatacagctcctgggcccctctaagggagagtctaagtcagcaggtcatgggcccaaggagttgtatttttttttaaatttttcagatcattgtgatgatgggccaagtttggggactgctgttttagctcacaaattcctggttgatgaccatcacattggttcttggtttttgtttcaaaaaagaaaatcaaatggacatctaatctgtggcccaacaatttttttcctatattttatccaaaagaaatgaaagacattcaagagaatggtcaaagcagctttattcacaataggtcaaaaactggaaacagcccaggtgacccacaacatactggggttcatccatgtggtggaattctacccactgatgagaaggagcagcctgctagggtgtgcagccacatggctgagccttgaaaacacacgaagcggaaggggcctggctcagcagtgcaagtccacttataggcacctctggaagaagccaaactaattggtggtttaaaaattgtcatggtggccgggcgcagtggctcatgcctgtaatgccagcactttgggaggccgaggcaggtggatcatgaggtcaggggttcgagaccagcctggccaacgtggtgaaaccctgtctctactaaaaatacaaaaattagctgggcatagtggtgggtgcctgtaatcccagctactcgggaggctgaggcaggagaatcatttgaacccgggaggcagaggttgcagtgagctgagatcacgccattgcactccagcctgggcaacagggtgagactccatctcaaaaaaaaaaagttacagtgtttgcctctggcagtggtgggagtcggagtgacggggggcactcctggactgagcaggccctgctcacagcacacggctgtctaattgtcatgtgatgaatccaactgcaaggctcttaaaatacctcccaaatccttaaagaaacgtaaagttacattcaggataatcaaagtgctgataaggatggttgagtgtactttagtcatctgatacaatttgtgtaagatttatgtggtcacactcagggtgtgcttgactgattggaatttctcgcccacactggataccaaatgtaggctgcctgaaatccttgggaacaaagtgccttattcaagaataacagaattttatcattgactccattgcaatacaacatttggcatatggtatagccaacaccatgttatattatagcagggttttgttttctttcttatgttgggttttctaattagaagtgtgcgcatagtgtggataagcccaaagatagcacactggttttcaggagagttttctctgtgttaagttgggccaaggcagcttagattcaacatgcccagttccacacaggttacttggttgggctgtaatcttggttcttaagttcatcacctccagccaaggtggacagtacagagctctagccccgagcatttgcaggacaggtgttctgagcaggctgtgtatgactcgtgatgctggtaacttcacaactaagggctagtgaaaaggaaaagatggaacaaaggaagacagcacaaaagggtgcctacaactgtgcaccatggagagtttacataatggaaagaatattaaagatacaaactgtgatttaaagatacgcaaaaattgtgatgcagtcttgaagaaagtgaaattttaagacaagtctgccattgtctctctgttgttttggccccatgtacatatatttcctctgttttcgttggtggtattgatgctagttgtgttgatgttgatgctggtggtattgatgttcttgctgctgatgtcagtagtgttgatgttgctgatgttggtgccattgctcttgatgttgatgctgatgtaatggtgttgatgttggtggtgccattgttggtggcggtggtgctgatgctggtagtgttgatgttggtggtattgatgttgatggtattgatgttggtgttgtcaatattattgatgctggtggtactgatgttgctgatactgttagtggtgctgatgttggtggtgctgatgtaagtggtgtcagtattgttgatgttggtggtgttgatgttggtggtgtcaatattgtcgatggtggtgttgatgttggtggtattgatgttgctgatggtggtgtcaatattgttgatggtgttgatggtggtggtgttgatgttggtggtgtcgatattgttaatgttggtggtgtcgatattgctgatgttgttggtgtcgatattgttgatattggtggtgttgatattgttgatattggtggtgttgatattgttgatattggtggtgttgatgttgctgatgctgatggtggtgtcagtattgttgatgttggtggtgttgatgttggtgttgatgtaggtggtgttgatattgttgatgtttgtgatgttgatgttgatggtggtggtgttgatgtaagtggtgtcaatattgttgatgttagtggtgttgatggtggtggtattgatgttgctgatgctgatgttggtggtgtcaatattgttgatgttggtgatgttgatgttcttgatgctgatgttggtggtgtcattgttgatgttgatggcggtactgatgttcctgatgctgatgatagtgatgttggtgttggctggcctctctgcaagtttgttttcctgatgaagactcagatagatggtggcatgctttgtgtcaggcgtgatttggactggcaatgccgtggtgaaaatatcagatgagatgtctgctttcatggagctcacagtctggggtgggggccaggcatataatgaacaagtccatgtacaatgacaatatcaggaagcaagaagtgccatgtacagaatcaaaatattaaatattgaaagatagtatagaacatttggggaagggctactttaaatagtattgtcagagaagaccactttggggagtccacagttaagccaaaacctggatggcaagttgaagcagccatgaaagatgagggatgagccaagttggcagtggaggtggatggagaatcattttcagctttgagctgtcgtgcctgtcagcctgggatggtcaaccagggcttgggatttgcccatggtagagaagtaggtggagcccagtaggtttgaatgaagtacgtaaattagactctaataaagtcactcaaacccatttaattttagctcaggaattttcctggaaattgaccaaagtggacttttctatctcttgactgttttccaggagacgcagaatacaggcctgtgtcagtgctgtagcccacactcgctgtgggcctttccggagttccattgtctgtgaagtatgctatgccctgcttagcctagagatttgtttccatcatatgtgaagcgtgctatgccctgcttggcctagagatctgtttggcttctcctggacaatgcccacaagtaaccttttagttctctgagttttttgcttcttacagagcagtcttcccctctgcaggtcatcacctctgttgccccataaaaataagttgttaggaaacaagctggaaagtgggtgctgatgcgctgccttaggcaatgcctctacggctacaacccgtgtgccattccggctcttctccttcacaatggctggtggctgccagtgagataaaatggcagcctgtcgctttgtgcctccctgcaggagacaggttcccagggggatatccgctgcacacagggtagattcccactccatcttggggctagtggtcttgtctggtttagtcttccttcctctcccctcctctcatgcctccctagccagtcttcttggatggtaatgcaggtcagagtcatgataaactttcactcccaaccctctagggtgaccccctccagaaagagagcagacccagtgtggattccgctacaggtggcccccaccccagtcctgggagaacagtggcccgtacaaattgccatggaggcaggtggatgcccctcagagcctggcccatggtcctcagtgtcccccacaaacctccccctgaagcaagacctgaacactctggagcggactctccaggtctgtgttgttgtgacagctcagcagccacactgccagacaaagagcaggctggggagaaaatggccgtctgactgctgctcatcacacacaactccaggagcaggtggagacaggagcgctcagtggggccgagccgggctgggtgtgagcccctgcaagttctggaggctgggtcccaggttctgacttaaaatcacggctgctgttcatcctcaaactcgagagaagtttggtgtcaaatgttgccttcatcctcctttctctaaactcaataaggagacccccacctctgctcgtgcatactgtgcaaatcgctgaaatctatcaacttgaatagacttagaaaatcatatgctgctatgaaagaaacccataaatgaatctttatatttgaagttttttcatttaacaaatgcattgttatccattatcctttcagtacttaacaaacaactcataatgaaatacagaagggctcaattggaaggcttttctttttctctccaaaatagctatttccttgcaggtagtaattttgtttcaagaagagcgatgtttagcaccaggctttttaataaaatatgtgtgagagaataattcttctaaaacattctgtatctacaaaaatctatatgtgagagaacttgaattattctctaatagattttattacatagcagttaagaatttctctaagagacatctagtcaaaggcatcaattttggataacaaagcattggagagaaagggacttattgaaaactggcgttatttgctattttgtgaattctttatctgtttctctagctatcattttctcctggaaggtggagcatctgaggctgtgattgagtgtggtagcgcctcgtgcatgcctattgtgatcagctgcaaatgactgagctgacattcattcgcccaacctgcactctttggcgtgggccctccgccagatgccatgccctgcactggggaaactgaggctggaagaggactatccacagggagccaccttgcatggtgggagtaacaggggctgagttcaaggttcaggggcccatggcaggggcaggagaacaagggcagggcccccaaacagctgttttaataaattaacatgatcctgtaggagccgatgctatttgttgaggtatgaggaccagaaggcggcggtggcctcgtccgtttcattcaggacttaatgttgagtctgtgatgtgtcaggcatggttctggacctagaccttcaaccaggagaaacatgtcccaggccctggagctcaggcacctgagggggagccgaacacgacgttcccctcgttaactacagcacagcctacgaacccccaggaggagctgtgggagggagtccagccacatggagcctggaacccctccccccgccgccagccccccgcttatcctgagaggtcgcccaaggcttccttggtggtagcagctgtgctgcagggcagcccgggactgcccagcaggggaggaggcaggaaacagatgaggctctgaggtgggaatggccacttaagaaactgagactgcagcctgggcgacagagcaagaccttgtctcagaaaaagaaagaaagaaggtaagagagtcctgggcaggccgggcactgtggctcatgcctataatcccagcactttgggaggctgaggcaggtggatcgcctaaggtcaggagttcaagaccaccctggccaacatggtgaaaccccatctctactaaaaatataaaaattagctgggcatggttgcaagcacttgtaatcccagctactcgggaggctgagacaggagaatcatttgaactcaggtggtggaggttgtggtgagctgagatagtgccactgcactccagcctgggcaacagagtgagactccatctcaaaaaaaaaaaaaaaaaaaaagagtctagtgcagcaagccagggacacacagcaggagagaggaagggaaggtccaggtgccgtgccatgcaagggaaagctcctcgaacatttttttctctaggtatttcattatgaaaattttcatacttacagaaaatctgagggaattgaacaacggacatctatatacccactgtctagattttataattggccagccacagtggctcactcttgtaatcccagcactttgggaggctgaggcagaaggatcacttaaggccaggagtttgagaccagtctgggcaacacagtgagaccctgtctgtacaaaaaaaaattaaaaattagctgggcatggtggtgtgtgcctgtattcccaggtattcaggatgctgaggcaggaggatcacttgaaccaggaggaagttgaggctgcagtgagccgatcacgccactgcactccagcctgggcaacagagcaataccctgtctcaaaaaaaaaaaaaatctaaaattcacatgttcctgtgtttccttcatcccatatctatcctctgcccatccctgtatccattttacttttcaatgcgtttcaagataaaagtgcagacgtcagtatacttcacacctaaacacttctgtgtgtatctcagtagtgttcaatattcatttacattaatgaagcaacatttcctagagaaaaagccatccattttaggcacgcattccctcagctttgacaaatgcttacatttgggtgaccaagactccaatcaagatgcagaacatcattctagaaagttctcatatccttgttcagtcagcccctcctctggccctagagcagccactgctgtgatttcttcactatggttttgcctgtgctgtgttctttggatgtgctgtaggcttggtttgatgttggctctgcttcttccaatgaaaatactgcatgcagcttgggctatgatgggtgaagctgctgagaacattcttgtgcaaatcttgttgtgggcaggtgtttttttttgtttgttttggggattgattttttttttttttttttgctttttgttttttcctggtgaaacatcttgccttaagtctctcttatccaatgttaatatcagccgtgaataagcctcttacgttcaccattggcatggtatttttcatattttgactctccacctgtctgtgtactcacagtgtgtgtcttgtgaacagcatgtctttgaaccttgatttttttccccatcctttctgacaacccttgccttgtaacaggattcctgatactttctggtatgttactggtgggggtggagtcgggtctaacacttgtatttgtgtttttgtttgctctgctctgtttgtgatgtctcttttcctgcttctctcctttcttgtgttaattaatttgttttagaattctatgttaatttagctataggatttttagctctacctctctgcactatgtttcaggggttgctctagggattacaatatacatcacaggctactgaaagatttggggttttttgttgttgttaaaaaaagaaaaacgaaaaaatgcaaatcaaaaccacaatgagataccatctcacaccagttagaatggcgatcattaaaaagtcaggaaacagcaggtgctggagaggatgtggagaaataggaacacttttacactgttggtgggactgtaaactagttcaaccattgtggaagacagtgtggcgattcctcaaggatctagaactagaaataccatttgacccagccatcctattactgggtatatacccaaaggactgtaaatcatgctgctataaagacacatgcacacgtaggtttattgcagcactattcacaatagcaaggacttggaaccatcccaaatgtccatcagtgatagactggactaagaaaatatggcacatatataccatggaatactattcagccataaaaaaggatgcgttcatgtcctttgtagggacatggatgaagctggaaaccatcattctcagcaaactattgcaaggacaaaaaaccaaacaccgcatgttctcactcataggtgggaattaaacaatgagaacacatggacacaggaaggggaacatcacacacaggggcctgtcatggggtggggggaggggggagggatagcattaggagatatacctaatgtaaatgacgagttaatgggtgcagcacaccaacatggcacatgtatacatatgtaactaacctgcacgttgtgctcatgtaccctagaacttaaagtataataataaaaaaaaaaggccacagcttgtgaagaccagatcggatgggcaaataaacacacaagactagtgaggtgttcccaccggttggccggttgattttccagttaattgaaaaaggagtttcagaatgttctagctcagatgaccacagtgtacactgaaactcttcctgccatggaactgtattgatagtgtaatcgataatgctatacacactcagatcagagacaaacagctccgacttccggtgacacctttgagaattgtctactcactgctgaatttttaaaaatccactcttaatataaaaataacatggaatttgaagaggaacctccaggatcacatagtgaccctcctttcctgttacaatctgcaggtgaacctcacagggccacaggaggacctcccaaaaaacacacgtagtttaaccaggatctccagaatctctgtccagggtggtctaatcttttgtcttccctgggccacattggaagaggaattgtcttgggtcacacataaaatacactaaagatagctgataagctaaaagaaaatcgcaaaaaaaaatctcataacgttttaagaaaggttacaaatttgtgttgggtcacattcgaagccgtcctgggccgcaagtgctctgaggacctcaggtgggatgagtttgccctagccctttactccagctgtcttctgtaaaggacgagggaacctagcattcagccccagcttctctcctcggaatgagtctccttccagtagaggatagaaccccacgtgtcctgagccttgagtaggagatgggggcgtattgtgacttgccgggagcatggcctccaggctgcatggcgggggcaggtttccatgcttacggtggtcctcactgctcatggaaaggagcttcggacacccaggtccctcctgagcctccctgcactgtggctgtggaggtcaggctgcctgtggttgtgttttcgtagctcctggagccctggttgcggaagccagtaggcacctttgcccactcatcctcagcgtcaggcagtcaggagcatctgggttgggggcacagccccggaccttcatgctgctcactctggccaggtactttcatcccctatgcctcagtttcgccacctagaaggatagcagtgcctcttgctctgccctgttaaaggttatgcgggactggggtgcaggtgtgcctggttcagaacaaggattcgatgaacggcagctgtgacttcattctcagcgcctcctttctaccctgctttaaagaaggcaagtgtgagtgtgctaggggggcttagggttgtttgtgggccacttctttatctaactgggccctgatgcttcagacagtgtccctgaggtcacacagggaggagggctccaagccagaatttagacctcagcctgcagacacaggacagatcccagcccacaaacgcaggccagtgccacctgccatcccatgagggcaggaacacgggggtgtcaaccttgagctcctcacctctgtgctgagcagacaccaggaacagggcttatgagcaaggctttggggacgatgaggagaccctgaattcatctgcaccttgagccggatacctctgagtgctcctgcactcccccagcctgtaccatggaaccttgttttctcccctccagatgtgggcatcgattctgtctgtggcaggggtggttggaagggtcagtggcaccattatgcaaagcacccaggaggcacgggcgcagcttacatgtccctgagtcatgcgctaggccatgagaactattattattagttttatgactcttgttgctatgacaacagcgctgggtgtgagggctgtcacttccctgtcggaatcactgtggcatcctcagccaggaggaggaggcccagccgaatggagcagggcgtcccctggcctcgggatggtcccgtgtgtcagtaacatgttcatactactgttgtgtttgtcaaataatggaagtatcatcataagctgcactgggaaatggaaattaaatttttcagaggatgcacggtgctgataaaggatgggcaccaaggcagccacgtgcacaatgatcaccaattataaagccattgctcactcgcgttcggaattgcagcgtgaattaagatgcttgtttgggaacagagtccccagtagttgctcattacaattccacatcacgggcgtggagagggagagaaacaaaatgcagtgtctttccacctgggtggctgcctgtgccgactctgggtcctgtctcaggccctgcagctcactgcaaagagacttgagtaaccaggtatatttgttgtgctgggaaaacacagaaggaagggaatgtctgcattctgcaatgtgtgctctttcctctcaagacacagagaggaaaagacctctgagaggcacagacacctgcgtatcataagaaggtagggctgtgtgactgatgggaagaggaactgtctctgcagcattaggcagaggcattttctgtgcatgttaatatttagtctttataaatcctgtttccttcatatcgttggcgtgtcaagtacttgacgtatagcctcacagcccatccagaatgagccttgaggttgaactggcactgggacatccagcccccagtgcaggcatgccctcaggcccacgcagccgctcttgatgtggaggcaggaaatggaaactcttcaaattcctgagcactcagctctctttgcagcattgtgctaagcatatctctccttgacatcgtgtcattcctgtgtccacagcaggcaggcccttgggaatggctctggtgaaatggggaggagagaactttcttctccgacagacggttcatgatttccaaggtcttctctggttaagaccagaaacatgtttctgtagagcccaaaacaggccacatccgctcctgctctgagctacaatagactcaggctgggggaggtggcgctgccatccgccatctccagtctccttatctgatgtttagagcttcatagtttaaatggcaatcattccttgaagcctgcagcctgcgataatacagctaatacattattgcctctggcttccgtgcagaacagcggttagagacgggtggaaagagagagcattggggtgactgagacaaatggagtgtggcctgcttgggaaatgctgaaaagtgttggtgtttacctggctacgtacttggccacggagagtccaggtgggaagaatttattaggtgagcgatgtagctggaacgaggcctggctgagattcaggagacggctgctgccgtctctgccccctcatccttgctgaatctcagaacctttgggcctgcatctctgcggcccggagacgctgactccagttgcctaacagagctgtggtgagactcaaaggccacacagaagcagcgtgttccggaaagcatgccgtgccctgtgaactagaagagggtactggaatactagctatcttcacaagcaccaccccgccactgcctccaccattcgttagggagccactcattatgggacggaccaccagacgcgactaatgaaacttttctgttctctcctttctaggtaagtgattccggtgctaacgctggacacgtgtgtccttgtatatacctgttgcgcctgcgagaacatgttctccactcccccagctcctctgaggaatgcctgagtgaggaccccgtgtaaagtaagatgaaccgagtgggcacgttagcccaggccgttaccctttagtgggcgcgtgagggctgtgggtcacagtttccaagactgatggcattgcatgatctttcatggtcaaacttgtgcaaatgaagaagtggagtgggggacaggggtgggatgagatagctaagcagtgagccagaaaaaaagcagttgacgtggacgatctaacctgagaaaccatcataggaaatgatgactctctgctccaatgcagcatctacaaggcccaaatgagatagaacacagagtttcaatgtgaacttcaaaacctgctcctgctgtaaggtgcttttcccatcttagcagcctggtggtctactttgtcgtttttcctgagtgtagcttggaagcttccatctctaaatctttaacattttctgggaatttgctttctgtttcccagggttgtcctgggactggcctctgatgaggcaaaggttgttctcttggtgtagccactggttcaagaagtgttttgggttaaaatgttaaaaatacatagctagagattatttttccagctcattgaaagaggagttacagatgcaacattgtctgtggttgtgtggttaagaagtgttccctttgctcctgagtcatatgtggaaaatcttccctctaaccctgatactgcacaatttgtcagtgttggtgagactcatatttagctgtgagcttcctggcgtccaaaggatagaggaaaataagagcactcaaaacagtcgccaacatcacgaaggagaaactgccgttattttcttttttgttactggcagaaattactcttaccagaactagcttattgcataagaattactctgtactggggctcctgaattggagacatcaaataatgtattaaaccacattcttaacatttctggagaagacacagtggagggttccttgtggttgttggggcaatttatttactaaaacagtgggatcacactgaagtgtcgctcaccgtgagcatttctgcacgccaaagatgattatgcctaaatgaatattcttttattggcttgatggaatcccagggagaacctagaatacctaaaaaaaatagacgcgttgtaaatactgtgctgggtactcctcccagcaagaccttgatgaggactgggcaggaggccccttgcctggggttgggctgcaaatgtcctggggtgtttgtggatggaacaactggctctaagaaacgggatatacgtgatcagggcgaggtctttggggagagaagaagctcaacgtgggcccacaggaaatgtgtccgttcatagttgcaggtggagcaacaggtgagtcaggcaagcatccattagatcttcaatcagctgctccacattgcaaatatgaaggatatgctttcaaaaaaggacaagggaaaataggaaaaggggtcgtaaaagtaaagataatcagccagcattactgaaagtgaagagaaaatttcttttgaaaaagcaacccagatgtttgtccggcatgagtgtggtatttgggatcatgaatgctgaagagtaagtgtgtcctggatgttggcgtcgggtcatcactgaccctaaatctcctcaagtctcacagaaggatgtaggtcatatgttagaggtaatatgtcataaggacataggtcatactttaaccttgaattcagggaataacatttggctttagggtaattgactccaacatagaatgagccacattctctatgcattgggataattcttatttatcattaactaaattattaataactaatgatataaattacataattactgtttattaaacaatttgtattgaatgttattaacatgtcaagcctgtgggtacagtggacacaattttcttgtgaatttcatctgaggattggcatctgttcccacagcgtgaaggtgtttttgctgtctgaactctgcgtctttggctcacccaaacagggagaagaacatgagccaggtcggccaaggaggcctttgcttatggtctggttttctataggggccagagatacgcccccatcccactcgccatccctagaccacagcagccttccccatgtcctgttgttggaccgaggcacgcctgtcttgggaacaaggacctcactatttgcaactttcttggagggccttcaggatctcagagctctgtgcctcagatcccgcaggtagtactgaagactggagcctgttccaacggggctggctccgtggccggccacacactggggcgcgagcctctgctgccctctgtgttgcccatgtcttcctatggctgaggctggcttagcctgaaattcaggaggttcctctctcaaggaagcctattagatactcagatgttcggattgtggtttttttctcactgtctccagagacacatctacagctaaaatgatgcttgggatggctccttaaacatgaccttagatagaggtggggtgtttgtggtgacatcctgggccttctcttcctttaactcaggggatctcaacggggggcagggggtggcttttgaagcccatagaggttgtgactgcccaagatcccaccgtaggcaatggatccgtttcatcctgaccgcattcctccaggcgcagacacgtgtggtggctgcttttcagcagagcggaggatccaggccccagcccctcgttaaacatccagccccacctgcatgtcaggcacaatctggacgttgcagtgacagcgtctttgccacatgcaaatctgactaatggcctaaattggtaccagaagaacaattacatggactctttcctgatggctgtgcgtggtggcactacccttgatctcggcacagagttggtcagaaagcacacgctccgcttccatacccgtacacgcgtcctcatcaccttcaccgtttcctctccaagggcttgatttagaagaagtgtctggtttaatggggaaaataaaagatgaaacagcaaagtcaggccactcaaagcgctgcaaatgttggggagggggcttctctttcgttacacagctcagtgttcattgtttgctctttaacattttgcttaagatgtagggctggaggctgttttcctggtggagattattttaaaatccgcatctgctttcactcatgtctgggaagggaggtgggtgacgcaagcgaggctcattgggtggatttggttcattgtggggtgtttcaccgtttacagcaaagtgatggctaaaaagagttaaatgaagacgagagcaggagagagcagcaccgtcatcagcctggcattctgctaccagcctgtctagagggtggaaaggaaccctgaaccctctgaatgcagattcagtatgcttcagagcgtttctaggagttaggcgtagcttcaggacggcccgctttggaatccaatcaatgggagcatagtgttaagttcaggaatgaaaggttctgagggcgactctcttttgtctttgcagcctgtgatcttaaggagacaaattagcactgcagatggaggaggcggcactgggctttgggactatgcagggggccccagtgtcagtgtggaccagggaaaaagtacccttcctaacgctggtgccccactcagcacttgcttaggaaggtctgtgccagggccaagggacatggtcatggccgtttttattctttcctgtagaatccatgattgaccctgtgcttggcatcctgcctggcaagccacagtcgctcactgcaagttggcgggaaaaaagaattggcacatgagagtcttcactcccaggacgctaatgttctcgtgtgtttttagggaaattcagtcctcacgctgcttatgttaagatgaatgggtttattggttgccccacagtatatgaaggtccacgcagtgtttccattcttcccaattaataaaagtggaaaatctctattgatgtgttgagaaaggaactcagacatgcaggaatctgccaggtccattcgaagtctggtgatggtacgaaaacatggtggctgaattagacaaatgcagttcacactggatgggatttgagagtcatttgctccccataagaattctgaatgtggagaacaaaaccaaagtgactttattatttgcgttaaatatttacatagaggggagtaaacagtgtgtgagacacactatgacagaaatgaatctttctcaaaatgacaagttaggaaacgtatgcattcggtggagagtaaagacgctcatgcatcttctttgcatatgcggtgcatgcaaaaaacaaaactctagacaattctctgtcctcattaaaatccagttacagtaatagctcagccttaaactcgaaacattacgaatgcaatataaatgtttaaacagtttggttgcataattcttcagttcacatttcctaccattggtgacctggttctcaattgtagctggctttctgggatctatttggtaaaagaaatttgaagaatacgctactgaatacattacatcgtatccacattattattattttctttctcccttaaggattaagcttccattttggcagctttgcctgttgggcagaattgtatcagagaattaattgtatcaaagaattaattcagtggatatttacatggtacctactaggtgcagatcatgttgctgtatttacttatagagatgagtcggcctgcaggagctgggggaggaaaaggctgagccaactctagcgtagggtcgacctgcacgttatgagagcaactcaagagaggctttttgggggtctcgagggacctgctctgtctaactcactctggatgggaactgctgggagaaaggagaggctgcagggtggtgctgggtagggtttaaacatttgcgaaaggaaccatggacactgtgggtcgggagatttttggaatactcagatttgagcaaggaaacagcaaggtccacctattcagacatgaggctgtggatgccccaggctgctggaagaattaaaattactcgaatcagtggctcgtaaccatggtggctttccaacagtgcagcttcagtgaaatatgccccgttttgagacttttgagtgttttgttttcctaaatgagtttgcaacatgtgtgagattgtttagcagaatgtagtttcttgagtcagatgcaacaactaaaaataaatacaaatacacatatacacaacagacatctataaatatatacatcttccccaaaggtagtttttctaaaagctagaatagcttttggtaccacatctaattaggagatggtagaacaaggcgcagccatcttgattataataaccgtcttcagataacgtggtgttaaattagctcactcaacagctactttgtaagtagatttgatttatttttagctcttattggaagccaggaatccaaatggagatggagggttttccgggagcacgggagatcgctggccagcagcacgtgaccgggctgctcttctgagaagtttgctgtactttgcaggaggaaattttaagtaaaacccacagtacaggtggagttcactgtgtctcaggcaccaggtttcactttaagaaaaacagacgatttttctaggaaaaaaaagggtacctcctacaaaatacctgacccgtactcctcaaaccatcaaggtcaccaaaaatgaggaaaatctgagcaaccgtcacagccaagaggtgtttaaggacacatgatgactccatgtcatgtgggatcctgggacgggaaagaggcattggggaaaaactgaggccatctgaatgaactctggacttcattaataacaacatattggcacttattctaacaagtgttccatactaaggtaagatgtaaacagcagaggaaacagggcaggatcgctctgtgttatctttgcaacttttctgtaaatctaaaactattctaaaataaaaggctcgctttaaaatgtataaacaagataatttaaaacgcccatgaccccaccgccgggaagacgtcgctgtcaggatggggttgtatcctgctgtctctgtgcgcactgtcgtgcagagtgagaccatgctgggcattcaagtttgctgcgtgcattttcccttcatgttgtacaaacataagcatgcttcccgtgtccctaaaaatgtgtttggtcaatcagtcagtgtgtaaataaatgccacttcagagacattgccgcctcctaagagtggaagtaaatatgcaaatgattctatgtagcaaaacacagaaggtcccaggcagtatgtgtgccccccactgagttgggtcttaatgctcacagtgggggacaggagcctggagaggtccccaccgggtgagaagccagtcctcagtgaccggggccacttctcgtgtctgtgcacactttcagccacacgggtgcccccagccccaacccattggctggctgaagactgttgcggtcggccctgagctcactaatgagaagctggtgactgtggctgggtcacttgggttgggaaggccccctcctgagcagagcaggtggacagtggcggagcccactgtgatgggtgacagaccaggctgtggcagggtttgtaatagagaaccaagacaggggcatgtgttcaggaggacctggtggcaggagggggcatccaagtggcttctaagcagcagtgctgaaggcagggctggcctcaggacaggcagtgaagcccaggcgctgccccacctggaatgcctggctcagcctgggtggccaccgggatttgagcagtttcttcagctgctcttgagcagcacagaaagctctactggcagatagggctggacaaaaatgatgctaacttcccgcttggagcccagagggcaaggagggcttgggctgggttggcaagtggcttaggaatcaggaagctgggttccaccccctccccactctgcctccacagcaccagctgctgtgttaacatcctcagggcaggagcagcttctctcccaggcctcgcccagtggtacatgctcgcagcatggacctggacctgcctgggttctaagccggtctttggaggaggtgtggggttcactgtgcctggttggagcagcaaaccctacacccctgcagatggtagggtggacccaggcacaaaggccgtggcatcctgcagcaggagagccagctgcctgtctgtggtgggtcctctgagacggcagaggacttggggcatgaatgaaatcaccttgtcagggtctaagcagaatccccagctctcagagccccaccgtcagccagcgcctaaactatgcctcctgccctcagagggacccgcccacggagggactcatcctgccccagggaatattaacacgggagaagtgagatctggacaagggcaaccatgatttggtgactccaggaggtgggtgactgtgagctgtgagacaggcatcagtgccacttgctttgtcgagggtatcaagccaggcttcctggaggaggaggaggaggcattcgagatgggccctaagggaagccgagcatgtgaatgttgagcgggaggagggttcttcccagccacctagcagcatggcaagaggagggtaccagggtgggggacaggaccgtcatgccaaggccagaggtgcatgcacagccggcccacactccagggctgaaggctaagccaggcaggcgggagaagtcagggacaggagtggcagagtccacggaaggggaacaacaggctgaatttgcaagatttggctgaggctgcaccagtcagcagacagggtctgggtgtccaatatgacagtccagaggtcacttgccccaccgaagtctcaggaaaacagtggatttccactggcagatgctggtggctgcaagctctctatgcagctggcatctcaggatgtaatggagcagagcctcatattttaggggtaaaaaagggaaagagagaaaaggggtggggggatttttccatatggcgaaggttctcattaaaatcaattgtaaagttagctaatggctggttcatgtcatttggagatggctgtaaatatcagctgcatctatattcagcatttgaaatgttctattgaaagtctatgtaactctgtgagtgttttccagtggagtgttattcatttaaagttgtttgaaaatctgatcagaaagagcttcaacccggaaatttagtgatttgcaatatgccagcatctatgcgctcagcactcccgctcgtggagctcaggaaaggacacccatgagaatgttacttggtgtgtgctttgtgttttgggggggccaggaacgtgcattcaggggagtttctatttgcccaggaggattgtgatgtaaggcacaaggcccgactctggagatgtctggtgcatgggagtttgtgtggaagctggagttggccagcccctgccttagcctctgtcaaagagctggaaggatacgtttactatcggaatgcccgcatgcctgctgggctgatggcatcccataaagaagagagattcgttccacataaaatgcaaccactgtctactgccccaggaatggcccacgggtgtcgggggtgatgaccgacctcaggactaggtagctcccattactgcttggtggctgacgacccatagtgggattacttgggggattgcgttgctggggaattacttgcttgggggattatgaggcgggaaggtgtgccctccattatatagaggaggcaggttgaaaattgtattaggctgttcttgcattgctataaagaaatacctgagactgggtaatttataaaagaaagaggtttaattggctcaaggttctgcagactttgcaggatgcctggtgccagcatctgcttagcttctagggtggcctcaggaagctgacaatggtgggggaaggtgagggggtggggacagacatgtcacaaaatgaaagcaggagtgagagagagagagaaagttgggggcggctgtctcacactttttaataaccagattccctgtgaactcagagcaagagcctaatcatcaccaagggggatggcccatgccattcatgacagatccagacacctccccacaggccccacctccaacactggggattccatttaacatgagatttgctgggggcaaatatccaaactacatcatgagtgaattaggtagaatataccagcagggcgggaccgtgttatccatggagtagcaggccttgccttttggaatgtgtgcgcgttagaatcacctggggagtgtcagccccacttcacaccaccagaaatccacatttaggggccagtggcctggaagtcgtcttacgttttctgcatcccctcctgcccctctaactccacggcttgtgccaggaagaccctgctctgcacccactgccacacaaactcttgtgtgtttcaccataatgcagaattcattttaaaaaagtccttcccctaaagcaaactgctgaggctaaacagtagactcagagatgccctctctgcagctactaagaaaaagatcctcaaagaagcttctctctgctttgaccagcagcgggtacttcccaacactcacttaagtctacttatagcattttacaaatatgctcgtgaatcataaaatatgtgtatgcattaagcgactttgtggccgttttctagatggagaaagaaagacgagagagaagatgttcatgtttggcgagtgtctggcagaggtttaagagagcttggagcctcttaatcagaaacagagctaatcactttgcctaagattaagtcgtcctgggtgccttcccatatcttggtcctcagcattgatttcctgctctgagggcactgatacactaaattgtgaaactcatttttttccatgggtatactgtagaataaatatctggaaaattcttacattcctgataagatccctatagagaaagaatcccctctatctgcccctgagaactgtgaagctcgcctgctgggatcctgagatttcacagtaggccgagaacaccctccatccgcattgatttattcttgtttcctcgcctgcaaggactgtaatcaagcccgtgtgtttactgggatgtggttgagcttgctggctcttaaggatgctgagtagtaaactggggcgaggctcctgtcctgcagctgggttcctgggctgcccggtggtttggtccatggatcctgaacgctctctaatcaaggctgtgtgggcagtcgcctcaccaggtcatcatctctcaagggttaaccacggcagtgattggagtgtgtatgtgagtgtggccctcaaagaaaagacctcgagagttcttatagccaggcccgggaaggggattgtcccgcatggaaaacagtgagacccgatcatttcaatcgaccatacctcttccaggtcgcccatttccacttcataataagcttcatctggtccaaggcctagaagaaagggaggttaaatggctgagtctattaaaacatctgtcgccaaagccccactcacatcatgacctagttctacaagtgccagcttataaaagaccaaaagtaggtcatgggagggagatgaatggggcgaggggaaacatcatttcataagtagtcacttagaaatgttccaacaccggcacccaaagagtcactgacatgccagggcagcgtttccaggactcaccgtctcatttctcagtggtgcctggggacctacagcaggtggcccttgggggccgccgctgatgacaagcacgcacatcccaggagcacgtccattcctgactcttcgaggaagctcatggctgtgagcacaggaagtgaaaattcctgaaagaggaccgacctctcagtcttcacagggacatggatggatttgtgattgagcttgttcagtttgtgtgtttgtttgttttttgggccaattacaaattcagtccatgaaaatctgattgttaacagtaggatcagagcccccgtagagttttgtttttttccattttcaaagcacatgtgccctctaactgcaaagtgtatgaaggaggccgtgctgtcaatgagcagtgcctccctggaaaccttgtgggattttgtcctacaggtaggccgtccattcctccctttccaggcacacacagccagcagctgccattggccccttccatctggcctggagccctgtcctcctgcaggaggtctcagggtctggcccttcctgccccagggacttcctgttgctattgctcaggcccacgggctgtgatgccacaaggctgctgggcgcagggtggaaagggaacatccacggtctctgcaagctggccagcacgactgcgggggctaacttccttctggaacggaccctctgttgactttacacaatgttaacaaagggcctggggcatctgagaacttctgtgctcatctcatgccaacctcacagcaaccccacaggccacatccttgccatcctctccaggctgcagatggaaaccaaggcacagaaggcaccaggccgccatggcgcacggctgtgaaggaggaagccgggcccagaattccgtgctccctggtgttctagcaacaacattgctctctggggctttaacccatgccaccttccctctaagcagtctcacctctgaaaattgaccagttttcttttctctgaaacacaattttaaaaagcatctgacaaccacaacctgtgtcccaaggaagctgtaaccagctgcaggtgagaagcgaccaccccttccctagagtggaggcccctctggccacccactcactggacacctgtcccaggcaccacgggcctggcatctgagccccacagcatcttcccttgctccctgtcactgttactgaacccatctggggtccacttgcccagcacaatagagccaagcgtccacaccaaagtttcacagcgggagaaaggagggcatttatttgcagggcgccaagcagagagaatgggcaacgcccactggagacctgacctcctggctggcttacaagcaagagtttttaaaggcaggggcacgtctcaggaaggcagaagctacaggcaaaatcataaatcaatatgtggcttaaaaaggacatcttgaagtgagggctgacaggtcataggtggatccagcgattctctgatttgcagttggttaaggatttgtctaaaagcttgaggtcatcagaaaggaatgctaaggtctggctgctgggtatgactttcttcagacccctcaggaagaattttggaacaaaaaatgggggtcagggttcaggcctcagtccgccccccccgcccccccccacccccacccccgatgtctatgtgacagtggttggcattttctgtctggtgggggtccaggtttctgaaaaacagttcagggatgtagatcaagatgttatcttgggtttccatagggaacgaacatcttgtggttctaacttccttggggggctcttgttttaggctactgttcccttctcgcttttatcatgttactcatttacttctcagggctcgctgggtgcctggaatttcccttgaaggcactcaggattttcctttatttccatgttgcggggcctagcaggcccctaaaaggggtccctgccctgtctcatcactggcttgtcaaagggccataggcaaatacgcactggggctgaggtttgctggtaataagtacatggacatgacccttggcaatgcagctgaattgagaccaatagatttattgtgcctctcaaaacacagattgaatgtgggcctcgatattcattgtctcaagaacagctctggaattgtgggcaggaggatttagaaggtcatcactgtaatgttttctacaaaaggcacctgggcggcagccatggggtggggggaagggcccaggacctccctggaggcccagggcacacctgcctgcaccattgcctggcattggggcgggggcgggtggcacggctgggcctctgccctgcacctgaaaacaagacgccagctcttctcggtttcctgccaaagtgccaggcacagagcctgtcattcacgatcatgtagcgagttcagagagaagaaaactggaattttttgtttaatgcaaaatgtccttgcttttgcattttggcaaacaattgaaaagctttaacatctgtgggtggcccagcaccggcaggccctgctgctgtccatcaccatttgagctcccggttctggggactcccctgtgtggtcaccctcacgatgtggcctgggaacctgcggtgagcatacagcaggaacctgcaggtcccagattgtcagaaaggacgccgcagtccccaaaagctgcatgtatgataggggagcactgctggctgcacctgcaaagccagtgaggaccctcctgggctcatcagcttagatcctggttttccctggatgggaagggggaccctcctcatggtggctgcagaaggatggtgtggggcttttctcttttcccctctgtgctacaaaagctgcctgttgggagtcggttgtccctccctcccttccttccctcccaggtggccttcgtaaagatgtaattgacctgtggattccaccagttagaggtgtcactccacacagaagtcccaggcacaaatgtccagcacttcctggatgagattcagggctccggtgtagtctaccccgcctggccattgcctctcttttagctacgactgggaaggaaggctatgatgcccagttacaaataaaggcaaaataatcacgtctggctttttttgttcttgtcggaaatctactctcctagctcgctctctctcactctgctcttgttctctcgctctttctcatttgctcgctcgctctctgtttcccgcgtggcttgcccagttcccctggagtctatcccccccatcccgcagtctatcctgccatccctcacccctcctgcctggtttcctggctgctccagggtagaatgcagaacttctccagccccatcttcccctgggctctggaacgcccccccaatacgattccaccgcaggcaggcagctccctcaccacaggggctcgcctcgtgctctgcgttgcactggcagaggggcagcacaggacttaattctgcagccaggcccttgggccgtgggccggaggggacgctggccacctctcttaccctagaagctgcggcaggtgtccgccctggggactaagcaaaacagggacagagccaccggccccaccctaacaggagcaatccattcctgttcctcttcctgctccttccttacatcccgtctattaatgccatggtccctgagcagtcatgggaccaacatctgtcacacacatacagagcccccgtcggacgctgcatgagctcatgtgcatcacctccgactcctcatcaccagatgccgctgcggcttccattttacagaccgggaggcagagccccagaggtcaagccagatgtccatgttggggagtctaacggcaggttctcaccgccctggaaactacatctgcctcagacctgcccccctgagtcacagcatcacagaaaacagtttacaaggtcatctggcagaaagctcagtggctgagctattttaaagcaaagtatcagaccctcagagaggccggattgattgtaatagcacagggctgcagcacaggctcagggtgcaatgtcaaaccgcggccctgcccgagagcaggcactaaaaataaccaggctccgttcccaggtcagtgagtgtcggtttggcgatcacacttgctttcttcttgggaacctgggctcgctgtccacacagcccctgctcccctactccctggctcctcgtcctagcaaggagctccaggcaccctcagcctgtcaacttttcaactcctccagcgagtcctgtgtttgtaacatggggtgttttcaatgtattgggatgtcatgcacgccctgaaaaatgcaggcatgattagtacccaaccagacagctctgcacagactgcagagcccagtgtggccagcacccagcttgagtcacactccatctgcccttccagaaagctccctcaggccccttgtggccacgatcccttcaccaaagggtaaccagattcctgtattccaactttctagatgttgcctgactttgaacttcgggtaaatggaatccctttttgtttttagaaatgagatctcactctgttgcccaggctggaaggcagtggcgcagtcacaacccacggcagccgccaactcctgggctcaagcgatcctcccacctcctgtggggctgtgtagctggggccacaggtgcacaccaccttgtgcagctaatttttttactttttgtagagacaaggtctcgccgtgtttcccaggctggtctcaagtgcctggcctcaagcaatcctcccaccttggcctcccaaagtgctgggattgcaggtatgagccaccatgcctggcctatagacttttgtgtctggcggcttttaagagtcagacttgtttatagtccccccagtggaggatgaattcaagcacaattcctgccttcttcactcctgaccttggaacttggcgggtggctgagccccttgagctgcaaagtgaggagaatgacggcagcgccgctgtaggaccatggagggaatgaacaaggaggggttgtcggacgtgttcaggacaggaacagcacactcaaggtcaccattcgtcttattcttgtcagctattatatgtctgattttatggttttcatcctgaaatacgtggtcagtccagggttcatcgttttagctgagttacctcttatttcatttattctcagttccgtcccatgcaggtgcctcacaaaacccatatacccctcagggtccctcccccaaatgcacagacacagccagacagcttctggggctgattgcccctggatgggcctctcgtgtggggctggggcaggagctgcctgcctccccgtgcggggaggatgcctcagcccaggttacctgatcccttttcaggcgctattttccccatgcagataaggccctcagttttctaaagaatttgcaagaaatcatgacgctactgcaagggtttagtgctcattcttcactcactgtgtctgggacactaggtgggtgtttattctgccatcatccctttatcgaacaccaccagttcctaggacgaggaagcccgtgcctctccacaggctgactgcatggtggtggtataattcccactataaagtggaggactcccaggtgcagagatgggctcttaaccacctcttccctatgctaagtctgttccacctaaaggaaaggtacgttatcagataggctggaatttggccaaattctctgttatgatgaggctgtccatcatccatctgtcatccactcatcatccatcatccgtcatccacccatcgtccatccatccatccttccatcattgattcatcatccatccatccgtccatctatcatccatccatctatccatcattcatccatcatccttctatttgtcatctatccatccatatatcatccatccatcatcatccactcatccatccatccttcatccacctaaccatttatccatccattcatccttccatctatcatcctttattcatccatccttcatctacctatctgttgttcaatcatccatccgttcatccacccatcatccattcatccatccattcgtacatccacccatcatccatcctttcatccatcattcattcatccatccacccatcatccatccattaatccatcattcatccattcatccacccatcacccattcatccatcattcattcatcaatccacccatcatccattcatccatcattcattcatctacccacctcattcatccatcattcattcatctatccatccattatttatccatccatccatccttcatccatccattcatccatgcattcccaggatgcacactcatgaagccctgtccaccaccccagatgggctttctgtaagtcgctgagtatgaccatcacccctccagtggccaaagcctagaagccaggtgctttaatggaagtttccaccacaaatttctggacccttggcatcccattcacagtccgcaaggaagaagggcttaaaagcttaataacatttgggaccttcataggatgatgtgtgcctctgtctttgaaaactgacttcaatcactcttttaacacttaatgacttctcagaaaatttgatgtctccattctagacatgaagcagtcatttcccagcactgtgtttctagcctctgggctttggttttatacccatggattccagtctagaggcagctgcagcagctgcacatgcaggtgccggcgggaggtcctctgatcattctgtgcaaaagcctttttgaccaaaggagctacatttgttgtccttccatcatgcttaactccttaagcctcacggtacattttctccaaaggcattgtgatgtgacgggtctgtgttcaggctccccaaggaggctccctggtgccccgaccccgaggagggctcatagcactggccaggcagcgctgcctctcgggctgctgcgccagcatcgcagggcgattaccctgtgctgctctctagatgggtgtctattctttcgttgttccttaatcgaatgccactagttcctgggcgcaggacgccagtgtgtcttcacaggcagactgcgtggtggtggtataatccccattaccacgtggaggaaactgaggtgcagagatgggctcttaacctccacttcctcagggccctgaccgctgtctagaagggcctcgtcatgcccacctgagacatgactgcctcgcattagtggtgcccgccgactctgcccaccaactgctgggccacatgggccctgttccccgaaaggctcagatccattgtatgagattccccaagaccctgctgacacacagacttgcgtgtgtcagtttctaggctattgactatccattgatctgcctgcgggtttctaccaagcatcttctttgggaattattctgcccagtgctggtgagtgggcatcaccagcagaaatgcccatgtccatggagacaccaactcaacccatctgatctgtcttccagtctccaaggcggggtgatagtagtacctgcatctgagattgttgccaggaggccgcctgtgtgggactgtctgcagagcccagcacagggtgactgcccagtcctgctggtgctggaccctgagaggcagtgctgcctaggaacccaggctccagaaccacacccttgggttgaaatgccacatccatcccttgatagctgtgtgacctcaggaaagtcactgagcctctctgtgcctcagtgtcctcatctgtgaggtagagataaccccgatgccttcctggaggggtggtgtgtgtgtcaagggagctgtctgtcaggccagcgcttagcacggagtgaagcaccagctaagcaagtgagggctctggcattgctggttgtcaggctgaccaggccctgcctatggatcaggcaccaggcttggcatttggcgcatagtttcctctttcatcctctgagcagctcagtgacggtgatgcgggtcttttccttcttctgagcatcgggagggaagcggtaaatcagagtgcacgccaaggcttccaggccccggatcctgaagacttaacaaccccccgtactgcttattagaggtctttaacctgaaggagcttcagtcttgttgggaaagcaggattataatcatcccactctggcaggaaaatgaagggaataattcagagttcaaacaggcaaccgcacttagtgggcgaagggagcaaacccaggtcagtgcagctctgcgggggtgcagctccaggggccttgaagggcgagtagaattgaggttgtggtgggaacacaggagggtctcccaggctgcaggggggcccgcacccacctccttattaagaactaattgtggtctgttctgatttgaagatggctagtgtcttttgcgatcatcccatcagaaaggacttctgcttccctctttgcttaccctgacgcatttgtgatgatgactaatttccagcacgtgtggagggctgcatatttctgcaagtcccgctgcttctgagctcctgccagataggcccattgggagcgggtctgtgctcacagcctcctccagcagtgacaggaacggcctctgagaggaggggcagctagacagcaaaaccaggcaccgttttccaaagctccatcaaatgcatcacttggggagtatattttaagaggaggagagcgagtttgtagggatcgtaagaagatgggaggcagcgtcagccctgtctctcttttgctggaaggtttacaagttgagctccagctccgtgaacaagcagcagtgagaaccgtgggacggcacaccacaggcttcactcactcactctccagggggccgccaagaaaaccagtggtgcccccactttacagaggagaggctgatgtgcagaaacctgaattcaacaaggtcgaggagtcactgggatttgaacccaggatctctggttcatgagcctggctgaaactagccatcttcaaatcagaacaaaccacaattaattcataataagaggggggtgggtgtgggcccccctgcagcctggaagagcctctcaggatctctggttcgtgagcccggccgtctgtatctctctgacccaggtttggtgatcggcccccactgtgttgccaacaggcagtgcaacggccggcctgtgctgattttagtcgcatttcctgttggaggtctgcaagcattgcgggccaccttgctgtgactcatggagtttatcttcctgccacaagtgagcatagatcttggtgtaactggttgaaggtccgcttattaattcccatgcatttgccaagagagcgcagaatcgtttgtatgtggtgagagtgaagctgtgtcccgtctgtgggagctctcagagattcgcaggccttctcctgaattcccacctggcctccctcgtgacagtggcgtgggctcctgcttcagcttggcagctccctgcgtgtccacctccgtcctctgaggtcctcaggggcctccagccaagcctcgctgtgataccccctcacccctagcttagccccggacccagtgggcacgtggagaggccggatcgggaaccccccaagccagtggagcgggtggggagggatcccagaccccaagggatggggccagatttcctcccaaacccctccagccactgaaaactgatgcatgaggaatagccactcgtgacctcggtaaccatgtgtgaggtgctgcgccgtccctgacaccaaatgtcgcatccattaacgtttaattcaatctttttcaatatcacattacaatgtttccatcttggaatggaatggttatggttagcataaatctgccacgtacacagagacttcatttatattagcttttatttaacttagtaaaaggtaatttgtttttattaattgattcattttccccccagccaggcaagcagccccactcggaactgcacgcacggcgcagtccgggtgggagccagcgctgcccttgttcacccggctgcgggctgttgtcttccgcggaaatggccgcgggctgttgtcttccgcggaaagtttaattgacggcccggtgccggtgtggccttattatctgctcctctctcccttcggttttttatttttgaagttatcctggccagttgattagtctaacacttactaccgggtgggccggagccctctgcagtgttctgctgtacacagagtgcagggaaagcacacaaagctgccgacacgcaggtgcatctggcagtgccctggcatcaggatgtggcctgcagaccagttggtagctccatcagccaccggcctccaggagcagaggaaggagcaggagggagggtgccagggaaggcaacccacaccaggtgacaggcggcatgcatcctgctgtccagagctggccagcactgtccattcactgcccatcctccatccctctccctagccacagaggtgggaaggcggctccatgccagaacggtgcctcagtttcctcattgctgctggagctttctcaccatcaggaggcctcatctcaggccacggcctactgatccaggcgactccgtctttgggtggagctgcggcactgccagcgggcccacgctggtctctgctcgccggtctctgctctcttgtcaggtgaccatgcgtttgccacgtgtgatgattgcgtggcatggcgtgctcctcgcacgcacagacacacccttccagcattccagcacaacacagagaaggcatttgcctccgtcattccccgccacgtgctcttccaaaaccttccatggaggcctcttgtaaatcttcctccctctggcagcctcctctcagcagcccaactttttactaaggttcattctataaacaccagggcagattgcagctgtcgtgcagggcatgcaacagaaaacaggcccggggctttctcccagctactttcctgggggacggatggccacagtggggccaggagggcaccacacgcttccgccgcccatttagggaagagacaccacccgtctgcgtccccgaccatcagtgtggatacctttgcattcgttattcagtaaatagtgagctcctttcactgccggggagacccctaccctctccaggtggagttgtaatgccaagtttttctttaccaaaaaagtcaaattaaaaatggctaaacagtttctaatgactgtagctaagagctatttgatggacaacacccgccactttgcttggatggtgttatataaagaagcaagatatctgacgaattcacctatatctacccattaaaagacccagaagccacttgtgaactgtagggcttcccaaaagcatggcagccgtgactccatctgtctctaaacatttacctggggaatgctgtttattaaagctatgggagaaaacccacacaactaaactaaaatcccgagcttgctgtggtccattgggctgctttggtttatgctgctggggttagaggaacattgctatggaaaggtcctgtttctacctggaatgcttccctactggagacacagtcactctcgagtcatttaaaaatacccaaaggagggcacgtgaaaacccggggaaagctggagaagacctggacctgcagaaagcctggacacctgcattcgtgcgattgtgtcggcatcctattcccgcattcaaccgtgggcttgggtcatgatgcatgtcgtcagcagaggaagctgggtgaggagtactcgggactctctgcactaattttgcaacttctatgaatattacacttttttttttttttaagacagagtctcactctgtctcccaggctggagtgcagtgctgcaatctcagctcactgcagcctcaacctcctggtctcaggtgatcctcctacctcagttccctgattaactgggactgcaggcacatgccaccaagcccagctaatttctgtattttttgtacagatggggttttcccacgttgcccaggctggtctcgaactcctgagctcaagtgctgcccacctcggcctcccaaagttctgggattacaggtgtgagctaccacacctgaccaactgtttcaaaattaaaatttttaaatgcatttttaaattccattctcattcattagataataccattgtagacagatttattgaacaaagtttccatgcccttgaacaaaagccagaatctcatacacagaagtgaccactcctcaccctgtccacctccaacatctttcatttaaaaaaaccttctttccactgtgaacatagacctgtgtgggacccaccagctggcttcaatgccagcttttcattgccaagtcagaaattatgcggggcgggtcatcttctgaatgatctctctgttgtcattaagctcaaatggtgcctttgccagaccttgccaggcatgattcccgggttttatcctaatgcccatttgctcagtcatcccccctataatttagctcagctggaaggttctggtgactggagaccaggctggaagagtggaggtttggacagggaattgagctgcctgtggttttggaagagcttccctgggagatttagagaagccccaggagaaagagggtcaggaggggctggattctgcagcacttccttgggtttgcccagtgctgccctggacagtctccatcactcagggccccccaacaggctggggaagcgggctgtgctcacctcctgcaggcccctcccaggatactgaggatgcatgcggtgagcagggtctgtaggctgctcagccatggccgtgaacccaggaagtgttgccttcccatccaggagcctctccagctaagccccctccagctgcagaagccgggacttgctgaactctgagagagcaggaggggaaacggattgatcaggtagctgccgtgtgctcggctctgtgctgcggctgtacccgatctcgttttctccttacttactgttatgttcttattgattagctgctgtgactgagaaactcagaactcccagggattctgcaggtttctttccggttcatgtcacagacccctgcggctgccccttgcctatcctcatttcagggaggaagactctctctgtcttaagtctcccagctgctgtggccgggccgggcaccgtaagtcctgctcatagcccagagaaaagcggagccaccgggaaggaaatgccatccccactgaccctgtggggacagctcagcgttggtggtcagccaatcagcttggccacaaagttagccctttagttatctccattttacagaagaggaaacagaagttccaagaaacgagttatcttgcccaagaacacatggtctcccaaaactcatgcagtaatgacaacgtggctagtacatgggtggggacgtggacactggctgttccttccgagtctctatgggtccctctgtccctctcctgctggtgcccctccccctccccgggtggttctgtccagcatttcagaagtctgcccaggcagaagcaggaggattcttctcttcgtagggataaacacgacccgcctggcctctgtatgagtcaggatccaaggacttaactttatgcagaaggaaacgaagccctttctaaaacacgagtcccccacccagccttcctgacatcctcggtggaggcagcccgcccaggtgagtgccggacccctcacaggagcaggatgtctcctccgacgatggactcatgtttatataagtctaaaaaagaccacatccctggcttgtttttttttctttctttttttttaatttattattataccttaagttttagggtacatgtgcacaatgtgcaggttagttacatatgtatacatgtgccatgctggtgtgctgcacccactaactcgtcatctagcattaggtatatctcccaatgctatccctcccccctccccccaccccatccctggctttttaaaaaaaatattatggggcaagtgattgatttcatgattgttggatatgagtgatggggagactggtttcagtttcatgattgcagttgtcatgtttccgaacttcctaaatagagctttatttttaaagatcctacagtcttacatcaagttaaaaaggttgctgtcaaaatcaaatggcatgtcaattttaatgagcaactgaaaaattaacaaatgtaacgttctaatctaattatgttctttcggaaagctttttgaaaattgattcaagtttgatatgtcaagcgttctaccgccaaggcagcagtgacagtgtgtgggagccccgcaccgggaccttcccgacggggctccattggcctccgtggtgtctctctagctttgggattacttgctaacgctgtaaaacttttcatgaactacgcgcacatacagagaaagtgaacagattgtcagcctacccctctgcactttgacaagagaatcacaatcagtaaccagcgcccaggcgcccctggcaccctccctaacctactatctcccaataaaggtaaacaccagtttttaaacataagagctttttttttttttgaggcagagtctcactctgttgcccaggctggagtgcagtggcaaatcttggctcactgccatctccacttcccgggttcaagcaattttcctgcctcagcctcctgagtagctgggattacaggtgtgcgccaccacgcccagctgatttttgtatttttagtagagacagggtttcaccctgatggctaggctgtcctcaaactcctgacctcaattgatctacctgcctcagtctcccagagtgctgggattacagacatgagccaccgcgtccggccactatatttttttaagcatagcatctgtgctttttaagcagggatccatgcagtgagggaggagaacctctatcatctgaaagtctgttctgttcaatgccccatgtggtttgcaaagcatgcgtgctgttttatatgtttcttttaaaagatggggagagggtcctgtcctggtgtccccagtgagtgagggccttgtggagacgtctcgtggttctggtttcctccccttccagaggcatctcgggtggtgtcctactgcatgtgtgccacgccaacatgacaagacggtctgtcagggcagcagcactgggcaggagagctctgttcccagaacccggggcaccggcgctcaccctttccgcatcttgctctggctttggttttgagagtggtgatgtcccattagtgcccctgacactttggacaatctacgcagcattattccagggtatagagatagttaaagcaggcccagctccttttcttaaaggatttactgattagctggaaaacaggtaactttaaaaaagaagaaaaaacaggctgggtgtggtggctcacgcctgtaatcccagcactttgggaggctgaggtgggaagatcacttgaggccaggagttcaagaccagcttggccaacatggcgaaaccccatttctactaaaaatacaaaaaattagctgggagtggtggtgtgtgcctgtaatcccagctactcagtaggctgaggcaggagaatcacttgaacccaggaggcggagattgcagtgagccgagatcatgccattgcactccagcccgggtgaaagagcgagactccctttcaaagaaagatgagaggaggggaagggaggggaggggggtggagggggagaggaggggaagggaggggaggggggtggagggggagagggagggggagggggagaaaatacaggctgggcacagtggctcacacctgtaatcccagcactttgggaagtcaagacgggaggatcacttaagcccaggtatctgagaccagcctggcaacgtagaaagaccccatctccacaaaaaagaaaaggaaagaagagaagagaaagaagttagatggaaggaaatgcaaagtccccagagagggggagaagaggagaccaaagctgcgggaatggagatgaacaacgatgatttagataggctggaaattgccctaagatgaagctggaagcatggcggggttgcatcctgggcagtgcggggcctggctgctctcccgtgtctggccgtccttggaaggggaactcgtgatgatcttgatttttttttttttttgtaaccagtgcaccgcccttgtcccttattattacagatttcttacggtccatagatgacattcactgatgtggggaattagacattttagaaaggttcccaacagaggccaaagcaggaagggttttctggtgaaatgttcggttttcagtcagcctggagtatttcgttcctaataaagatctaatcacagagattttgggtttcaaatccataggaaggaatgaccattttcatggtgagacattgatatttcattcctgagacccaaagccacctttgtaacctttcaagatcctttttgattgtgtaaacttcagaagtctggagatcttagatatcaggaagataaatttacataggtaagcaccataattcttgttcctcatatattttatattgcatcatttacataggctttaaatatccagtgaattgtaataaatggggaactcataataaaactggtaataaaatggattattcaggtgatgctgttttattacagtctcattatgattatataatccttattaaaatctggaccaaagatgaatttctcactggaggcgcttcacaagtactttaataaattctatttgttgcacaatcctggggtgaatgttggtttttataatttcatacaaatgtgttgcaacatgccatggaatctgactataggaatctgtgcagtgaggaaagagaatctctgtcatctgcaggtctgttcaatgcctcgtgtggtttgggaattatgtctgctgtttcatacgtttctgttgaaacatggggagaggccctgtcctgtgttcatggtgagcgagggccttgagggaacgtcacatgcctctgttttcttcccttcctagaggtatcttgggtggtgtcttcagaacttctcgttcttgctcaaggttcttttattggaagagctgtctgatgggtggaacacactcatcagtgtaatttttcttttcttttcttttttttgagatggagtctcgctatgtcacccaggctagagtgcagtgccacaatcttgactcattgtaacctctgcctcgcagattcaagctattcacctggctcagcctcccaaatagctgggattacaggtgcctgccaccatgcttggctaatttatttgtttttgtttgtttgtttgtttgtgtgtttgtttgttttgagagggagtcttgctctgttgcccagactggagtgcagtggcatgatctcaactcactacaacctccgcctcccaggttcaagcgattctcctgcctcagcctcctgagtagctgggattatagggaaccaccccacacccggctaatttttgtattttagtagagatgggatttcaccatgttggccaggctggtctcgaactcctgacctcaagtgatccgccccttcggcctcccaaagcactgggattataggtgtgagccactgcgcccggccagcattatgtttgatcttagctgttatggctgttgccccagtggcccttccttagaatcctaccctgacacagtctggggccttttggtcttgactgaagctgtacatggcagagcagagtcacgctgagtgactctgccatcactgtggtggagggatgccgtggcaaggggaccctgcacggcatgtactgggaagtagcctcttcccctggctcccccagaaagctctatcaggctggatgaaagccagagcaagccagggaggcagtcgaaggagagtcgcagaggccctcggaaaatagagaggcaatcagaatgctttggctagaaaggggctgtgtcagaagtgtttgatgccatgaagtagatggatctgttaccctaaaccgtggatgctggatccaggagtgagggctggggagcaggtgagcgcacaacagaacgagtgagggcagtcctgccctcagccagatccagcattagagacaagtatctccagcctcttgcagccttcttcactgttttatccatagctgcagccacagcgctgtccagggaggaggtgctgaatacgtgttggaaagaatcagctgctccgaggccctggctgtcaggacaactaatatctatgccaatagttcatctctaggcccccagatgggtgggccaagggaaaagcaaggctcaacagccttcaggttttggaaattcggtacacagagctgctgagggctgctgagggaaattcggtacacaggcaccagagggagaccttggacctgacctgctatatttgagctctccagctgggtggcctcctcttgcctcacttttcttatctgtaaaatgggtatagcaggccaggcatagtggctcatgcctgtaatttcagtaccttgggaggccgagacaggtggatcacctgaggtcaggagttcaagaccagcctggccaatgtggtgaaaccccgtctctactaaaaatacaaaaattagccgggcatggtggtgggtgcctgtaatcccaggtactcaggaggctgaggcagggaaaatcacttgaacctgggaggcagaggttgcagtgagccaagatcgtgccattgcactccagcctgggcgacagagcaagactgcatctcaaaaaaaaaaaaaaaaaaaaaaagggatttagcaaaaggatttacttccatttgttataaggtggaatgaattaatatgaaagagccgaaatgtgtggcacatgaggatgtgtgttgtaaaaagctttgctaagttaatttaaataaatattttctggatggcattcacggaccatccctgggggtgggctggagggcagcgccaagtgcatgcgtggacatggatgcagcacggtggagccccagctggcaggggccacggattggctttgagatgaggccgggatgagtcatcagcctgacgcacaggcctggagcgagtgctctcagaatgcagactggaaattggatgtggaaactcacttcgaccaacaccggttggggaagcacaattttaaaagcaggatttagataaaatgcttattagtaaagtgaggattatccaggattttaaagtttgttcttatcttctgcgctgctcaagtgaggaaacgaggtggcttcagcctgtggtggaggatcctcagctgtggaaagcgtcggccagtctcatagaagtggcgcctgttgccggccctcaggctctgccactgaggaggagaggcggataaaacacaggtgtgagcaagaccctaagaagctgctgccctccgtgtcctgactgtgtgaggacacactgatgacaccatccccaatcgcctgcagggcatggaccccacaaaaggggccacccaggaggcacccaagccctgagcaccgtgagtttgctgggtttttctctctgtcccctgcctccaggcgggactgcacctaaactaagtcatgtcctggtttctttgttcttctatggtcttcacacatgaaggaggtcccatgtgtgggaccctggcaccagttcaacacgaggcggcaaatgtaaaaatggagccccgtatgaaaatgaacctcttcggtttcagaactcagagaccctgaaatctgaccccactccttatgtcacctgtgactcatctttaaaaagacccgcatctcaccaccgttcagtaacaacaagtgcacacaacagaaaacgatgagtaagtggacaagggatatcagtgcaaaacacacaagcaatgcaagcagcgagtctgtgaaaatgctctcctgccccagaaatcagttaaaagcaaaccaaagcaccacgtttctaatctgatcagccaatgttttaaggtttgatgtgaggtggagcaggctctggggagacgggttctctggccgggttctaggggagattggggaaggtgttttggcgggatcagtaggtatgaaaggcatgtgatgagttttctgtgtcccgtaaccagttcccacaagcgtagcagctgaagcaacactcctctgtcttctcagagtttggcaggtcagtgtggcgtagctgggctctctgctcaggtctccctgcgatgcaatcaaggtacgggccggggctgggctgtggttcttatctcaggctcagtttcactcccaggctcactggttccttggcctgctttccaaatggcctcttctgcagggaatgccagctggtgtggggcagggggagacagcttcaaggtgaggaccctgagagggaccctgagagtgaaagccgaggagaaggaagcttggagcaggcacagagaagaaggggacttgggttgggggtgactcaggccactgaactcaaggtgggagccaacctcaaggagatggagggatccacaacagccagtgccacggcccagacaaggagtggcagggcgatggggggcaggcctgggcacggcaggcggctgggcgagcagcacggggaaggatcggacacccaggactgcccgccaactccgagcctgcaggggcccctggtcaagtgggtgtggctgcaacccgctgatgtaaagctgcgtcgcccaagtcctgctgcagaggcagctagagctgtgctcgtctctccatcccttgtcctccctagacaggaaagacccgcgtggcctgagagggcagggcatgcctgaggaccggggctcagcctccctggcggggccctggccggggctgctggaggtaggagcactgtccctgccttcctctgcccatgaggggcccctctggctgcctcactctgcaattagagctacttcgggtacaggggccattagcactgccgcctcctgcttcatggttgcacaggtgccccatgagactagatgggcccccactcttcaaggggaatagatggggtgagggcgtggccatggggagcatgggctctgcagacctcgcatatatggagcctaattacccacaaccctggtgggaaggagggagccaggcaaatgtgtttaaaacctcaatatgggaccaaagatgcttctagaaaagtaaccccaactcccacagaagcatctgactctgcagcctccccatccgaactgtagttgggaggtgcttcttgccattgcttttgctttcagacaggaatccccacctcctgtttagagagataaatggactgaatgttaacagatttgttccattaacatattcggcaataggcaggcatgagatagcataactcaatttctatcttaaatcattgttttaatctcacacttgaatatcatcatttaatttgtacatccagctggaaatattgatttttggaggcatttattctgtgcattatgtaaaattctatttgcactctgctatggaaatattactttgtggcttaaaatatgattgagagtgttccattttttcttgtcatgtctcatgcagatgggacactgtggcttcgctttgcattggggagggtatcggggcaggaacgaccacacggggcaggaggatggtttgctagaggaggcaaagaaaaaacactgtgcaatttgctggtttccatgactatgcaactcgtaatatgcattccatatttaatacacttttttaaaggtggtaaaatagcaaatcacaggctcaccgccgtgatcggaggctgagagcctggaagagctcccagccagctgtctgcaggcacctgatgtgggagggcacgggaccgggccggaggctgaggccttgcggtgttgctgtcctctccttctgcagggatcagattctaagtggtggttttttcttttctttctttcttttctttctttctttcttttttttttttttttttttttgaggtgttttcctaaacttgtgccagctgtgtggtcaacccgacggcctcccttgctgggacgctcctttggagcagcctctggtgggacagtggcagagatgcctgttcatcctcaacccgacggcctcccttgctgggacgctcctttggagcagcctctggtgggacagtggcagagatgcctgctcatcctcaacccgatggcctcccttgctgggacgctcctttggagcagcctctggtgggacagtggcagagatgcctgctcatcctggatccattcagaagccagccctgctcacttaaagggacaatcaaatagatgaattccctcctcctggttaatacaaacctttgcagactcatgtggaggttctgtccttaaaaccaaccattccctccaaggggcatggatgggtggcgctggttgagccctcaccatagttgatctactgaaacctgtgactgggctgggcattgccatgactgattcctatttcacaggcgaggaagctgaggctcagaagtgcgacctgatgacctgtaacttcagtggcagatccagtagtctcgactggttcccagcagccctacagtggggcaggctgagtcaggtgcagaggtgccctggccaaggggacagccccggggcggccctcaggctcagcctcgtgggcacggatcccatccccaggcccacggaacaaggaagggcctggctcttggaaaacccaggtccatttgtcgaggcagttgctgacagagaggaaataatggttgtaatgtcaagcttggggaaaaaatcaatttgtagttttcccagaaagccttttaagtagaatgtttttagaaataaattacatatgggaaagtcagaagcagtgacataatttgtggggcctggtgcaggatgaaaacgcgggggccttcttcaaaaagcattgggacttcccgagggcagcagcagagcattcacctggtgcggggcccttctgagagggggcccgggctgcatacccctgagcctccatggggagggtatgggggcccttcagtgccggtcctttgggcgtttgaatcccctgtactcgcccctgagccgccatggggagagtgtgggggcccttcagtgccggtcctttgggcattcgaaccccctgttcccgctcctgcccctttgcactgtgctcctctaggttagacgccctttgggtttcaaggtggcaagcaatgttgtgcctagctgggaatctagccacatcctgaaagattggggtgcttacctccctcagtatttcaacccagcagaccccacactgcctgcttccactctgcacttcttatggcattaggagtgcccccggagccccaccagagcctggaagaccatgggaatggcccagtgagtggcccaggctacctgcaggcacagaacccggccaggccagccaggcccaaaccagccgcagggaagggctctgctcggagaagcctcactgcctccctcgtgtgttccacgggtgcaacaaacacatctcagatccaaagccgtggctcccctcctgccccccgaacccagaagtccctaagcacttgggaggctctgccaacagggctgagggcacagacatggcttaactgggaagatggatccactgggtggtggtggaaaggaagaggccgcacccaaacagaacaacccatggaaagttccatcatgagacaaatgataatgttcatgattactaaggagggaaagaggaaggggagggagtggggcagggagggagggggagggagaaaaggctcgtgggcattgataacccacgaaactcaagccaggcccctcaccccttccgatgctccccaggcacccccattgcgaggccacactaatacggtagaggaaaaacaggactctatgatgcattgtctcacgaaataaaagaataactttaattagcgtgtctgaccgcagcattattttatgtgcatacatacgtctaggcctacatacatacatatacacatacatgtctagagacagcttcggttgccccgtctgggagcagtgccctggcatctggtgggtatagtttggggatgccgctacacaccccacagtgacgagaggaaggaaggagggcacagcagagagctggccaggcccagtgtgttcagcgcaggggctggccctcccctccagagaagaggccggtgggtcccaggaaggccctagctgcaggtacaccctatgctccagtgcctgggagtgtctggctcaagacggatgggtgtgaatgaacgaatgaccaagtggacaaatgatgctctgagcacccccagaaaccacttggagactcagtgtcccctccctgcagggctggtagacaggcgttcactggggatgccaggcgtcatgccatttcacctgtttaaaggctgaggtctacatcattgcttttgactgttcactttctttccccctgagctatctgctgctgcctttgtcacatggtacaatgtgtcagtggaattgttaaaataatttttcttagggccccttagaggtctaatatttgaaatccgacattttacttatccttcattgcttgcaatttttctctcctcagtagccattgtgtagagaagcatcacacagcactaaccaggtatccctgccctgagaagagagggagaggctgactgactgagcacgtggccggtgatgtgtcccaggtcatcagggaggcccaggccagctcgggagggcagggagctggggaccgcaacctcacagccaggtgccctcatcaagagctctctgcctaccactttctccacggtaaacataaaaagaagacacaaacctggaaggaaatcgccctaccccggtctagaactcaaggagccaggagtgatttagaagcagaagcgggcttcgcggacaggcacgcactgccctccccactcacgaggcgttgtgaggggtgttttttaagccattctcctccctttctgtgcagactcaaaaggcagatgccttgttgggagttaacaagccgggtctttcaaaggagagcttgaaaagcctcattgagttggaagccaaggggctctggagttagactaggagagaatggtccccttgagtgacagaaacatcacagcgccatgaaaggggccgagcgagtcggctgcgtggcctgctgtctccagttcctctccgcagtgtctgcatccctgggaactaccaccgggtcatggtggggtcaggccaacccggccacattgctatgaagaccaagttctcccacttgtttgagcaatagtgagcccctccaaacccctaggctgcttaattatgtacaaagccaggcccccggcctgtgaggaggtgcattcacacaggagctgtccgagaggccaagttcaagtccacccaaagctgtattttccaggaaagcccacacacccatttgtctgagatatgtggtgggcacccgttttccatgggctttcctttgaacctcttctggtttgagcagcgttttctagggctgatccagcagtgtcctttatccctccagctgtgcccgtcactctgggagaaggacacctgccatctcccctccccaggggctggtgcaccagagattggtaggagaggaatcgcatcaagtcaagaggtttactcacagacagatttgttctgctctgatacacaaaggacagaactaatatccatgccccaacccagagccggaaacccaggcccccactcctgacctcatccttccctcctctctcctcctactctgtgtactttcgcctggccttcctggagccaacactttaacatccgcctgtccctgctggtgcctcctgggtggatgcagtgaggactccttcccaggatctggtacctcctgcccctcgtgcgttcatgggaggccatgtggctgggcacagctcccagtcctccctgtccccaggagggtggatgggacacttgctcccactattcccactgggtgcgactgtccccaggcctgggtcacatcgtgatttgggggccacccccatccagatatgccacttctcgtctaatcagcacatacttgctggctccctgctgcaggccaggcatggggctgggcggaaatgctaatggggtcaggctcttaggaggctctgatgtttgtgcagggggtggggaggttgccccagggcaccgtggcttcctgcctgatgccaggtacaggaggtggcttgggcctgggttgtggccatcaagaaacctgcttcggtctctgccgctggaggcaggggaggaggactaaaggaggatcccagggtttgggatccacagcagatccgcagcgggtcaggtggagggggaagggaacttgagatactccacacgctctgctgctgcccaccgtggccggtgcacccacggccctggaggagtccccaggagtgcacagctgcctctggcctcctgttctcagcatcttctcctcaccttgctttgaagcctctgggtctcacccagccccagcttacttcttgcatgggccgtgtccacagtgtaggtgtattagtcagttgggaccaaccaagcaccactccttgggggcttaaacaacagagatttattttcttacaattcaggagctcgaaacccaagactaaggtgtgggaagagctggcttcttctgagacctctctccttggcttgtagatgccatcttctccctgtgtcctcacggagtcgtccctgtgtgtgtgtctgtgtcctcacctcctcctcttataaggacgccagccaggttggattaggccccaccctaatggcctgattttgccttaaccccgttttaaaggcccagctccaaatacagccatgttctgacgggattaggactcagcctaggaatccgagttgaagttgagctcaagctgttcagcaaggcagccacagagcacagtctgccctgggcagtggtccgccaagcattggcttggggctcctggtggtgtcccccccaagccctgctgtcacaggacgagagggagcagagcagggacacgccagctcttgacctccatggcttctgcgcatattcccttggccggagctgagcacatgactatgcctctccagagggtcttgccgagtggatctctgtgcacacaggatttgaaagagagtgtttggagaactgtgtggactctgtgtgctcaccacattccctgtccaattccctcccagcttcccaccgttctcctccccgatgcccgcagcgttcagagcagcctcacctgggaggcaattcgatccgattggttggtggtcaggtgtagacctgagggtggagggggagcaatatgaagagggctgaatagggtgcatgcaccgtagctctcccaggtcctcctggagcagggcctggcaccacatggacactcgacaaacctgatgggcggacgaatgcacggcagcgtcgtcttgatccaattttagaaactgccgttaggaagacctcatatcacaatggaagaatttcctttattgaaagaaaaaaaaattacctatgaaatccagccaaaaatgtatcctttgacatggttcttgtgctctagaagttggaacagtcttgaaaactgttcatgacggcaccggaagccatgtttgaaagggatgacctcacatgataggagggaagtgcccagatgttgatatctgattcctggaaaattagctcacctgtcatcactgagacaaggtggtgccttctgtcacataacttcaggggctggtcttggggtttaggagcaactcataaaatcctacctggtgggttccacgtgccatacgaaatgccggcaggaagaacctggtggctggtgatctcctgtcccagggaagatcttataaagccacatgaaggagtggtgacgattcaaaataatgtcactttcaacagatttttctgtttctaagatctgactttaggatgaagttttctagaatccaagcagtaagactggatgccagtttcttccatgcagcttcaaggccagaggcaatgtcaggaatttttcctctttctgcagcctgacagaccctgtgggggaatttggtgcttcccagtgattaggcgaccctgagaccctccaataaggcaggaagcaaacaaaagggccatttggttacaaactccccctgcgaccccataagctgttcaagcccgtgccatccttgaatttctttctgaaatgttccatcataaattgtcagagatggaagagtgggtgagaggaaaaatttgacgattccccattgctaactaaaatagcttattagctgccattttacccgtgtgctcggagacttccagaagggagctgttcatgtctcttctgcccctctccagaaaataattaaccaccccagtcgtcattgattccagaactatctgcccaggttattaataaaaatgttgaatcccggctcatgtgctgccctcccactggcatcaatccactgtgcacgtgcattaacgtgcggagaacgccaggaggaaatgagaggaggagaggccacatctccaagcaaggacgaagctcctcctgggattcaccacgacggttttagcctggtggtcggcaccctctgctgatgttttatttgtgtgttttccatgtagggtgtgtttctgtttttattaatagcaagcacactggctaattttctatcttaaaaatattgaatagagctctgaaaaggacacatgctgtagccagcactggggtgtccaccatctagaattagccgatgtcactactttaccacgtgagctgcaggtttgtaaaaggaataagaccggtgtagaaaaggtcatgttcccgtgatctcctgccttctccagaagcatcccggtggaaggcagcatctcttcgccatgtgtttgtggctttgctcttttgtgcatagacagaaattatgctagaattttatggctttttcttctcacttaatgcgtctgtgagcctctccccgtgggtccatgttactctagctcatttcagcaactctccagccagtgagtgtgccaggatccctctctctcctgaggacttggggttgtgtgtgacccttgctactttctggccatattcccacctcctccctccctcagggcacctggcaggattgctctgtttgctgcttgaagctggatatggctgtgtggcctggtttgagcaatgaaaggtgagtggaagtggtgcctgccaccacatgccgaaccatttaactgaccttgagcctgctctgggccctctttctcatgtgaaaatccaaaaatcaaagcagccgggaatgctgagcccatacccagagggcagctggtccagagaccacattccacctgctctaaaaatcaactcatactgggttaagctactgagatttgggggcaggttgttaattcagcaaaacccaccccatcctgactgatagaggctgcttccgattttctgttgttataaacagtgtgcagtgctgaccttcacatgtggccaggtttctaaagtggattcctggacttgctgagtcaaagggcacctgctttttcaactttcctggggttgcaatgtgttctcagtccctcccgcagcctctgagagagggtttctcacattatctctggcatgttcgtttagatcctgcacactttctgatctgaggagtgaggttatttcatcgctttaatctgcaatgggtacaactcttcacagatgcagtctcagttatgaggctttgaaatcctagggttttccatgataatgagagcaacaaactttttaatgaacaaatatcgtattttccactatattggggaatttttttaagttagcataagaaaacaaaagcccctaacagccaagtaaacttttggaaacacaagggaatatttataatcagaactcctagaaagggtctccttttcctcttaataaatagctctggccttattagaaatcggtattagggttctccaaagggacagaactaataggagagatgaatctatgaaggggagtttattaggagaattgaccctcaggatcacaaggtgaagtccctcaataggctgtgtgcacgctaaggagcctggaagccagtccaagtccccagatctcaaaagtagggaagccgacagtgcagccttcagtctgtggccaaaggcctgagcacccctggcaaaccactggtgtaaggccaggagtctaaaagcggaaggacttggagtctgatgttccagggcaggaagcatccgctcgggagaaagatggagaccagaagactcagccagtccagtccttccacgttcctctgcctgctttattctagccacgctggcagctgattagatggtgcccagccacattgacgctgggtctgcctcttccagtccactgactcaaatgttaaccttctttggcaacgccctcacagacacacccaggagcagtactttgcatccttcaatctcatcaagttgacactccatattagctgtcacaggccctctgcaatgtctatacttgttatctctagatgggagttggaacggagcaatggaaatgctgaagtgtttgacgtgactctgtaaactatggttgaagttcccgtgacttagaaaagtgacagtttcttttgttagtaaaagtttggttggcagtacttggttgagtgataaaaatgtcgctaaattcactaatgtcacttaactctgctaatctcacaaccttaataggattcatttgttacttatgacattgccaaaccaagcattatctttctatagtcagttatacaattaaaaaataataatagcaacaaagctgatggcgcctttatgatctgtccctgctgagacaagggctgaggtttcagtcagggggctggtgtgaccaggtgacccccaggaggctgcataaagactcgtgaatggcagctgtaaagtgctcttctcttaaagtaatctcacaagtgtaaattggcctcctgcaacgttcatttctctgagatggcgccttccttgctttcaggccactgaggcaaaggtggaccaaggctgttgacctgatggaatggagctggcaggtggccctcctcccaggaccctggactcccctaggattctagaaacagctcagattctgactggggatttttctgtcatctgcaaagataggctctccacagagctaagagggtgtggtggtacagctttctctcgtcacagctgaggtccctggaggctgccccacacccccggccccacacctggctcttggcactaaggtccttggaggctgccccacgccccctggccccacacctgcctcttggcactacactgtgtggtccggtcccacggccatgtggtctctttagatctgcggttctctttcagagatgatgctgccccgtctccccaggggacctcggcaatgccagagaccacagttgtgtatgtatatggcggggtacggctgacatcgagcgggtggaggctgggtacggctaaacaccccacagcccaggacagcctcgcagcagaagcatccagctccatgtatcactcgtgtccaggccgagaaacccgacgtagaaatccagcttgcccaggagagaggggtgggactcctggtgttcacttcgtagctgttctgtggtgggagcgcagtgggagccgcagggcatcggggtcttcgaaggaaagcccgtggattatgcatccaggaattaaagcagtccatgcaatggcagccgccaagcagagacggtgacgggatccctgcgttgacggtggcatgaccgtgtgtgatgggatgtgccgggggcagacagggcccaccagaccccacgctgctctactccgcaccggcccccctgcctgtacttgaccacactcctgccttctgccacagttgcagtttgggataattttggtggagaaagttgtaaaaccacctgaatgaattggcttggtccatggactggaagcctgactcccccgacagccctccctgcccccgaggaaggaaccttgttcctcggttataaaacttgagcttttaattgaggggaggggggatgcactagggggtcttggaacttggtacatacaggtgctaggtacaatcaaatgtatgtgataagtaattagatatccaggtagacaagtagggtgactagcaaatgacccttgagcagccctactggggccccgagtggacaaaccacaggcccctgtccttgggccctctcagatggcaggagcgccctcgcttctgtgggtctgacgcggagacagtgtctccagggtgctttctgagaccaaagtcgttcagcaaacagaagatcccagaaggcagcaagctctgccacgcagcatcgggacaacgtggctgtttactgctcccatgtgggagcaaccacagctttttaaaaagaccgagcagttttctgtgttaaaaattacctttaaaatgctaaagctgtggccatgtccaacatgcgtacatttgggaagtggcggtaaattccatgcaacgtcaattaacatttcacaattctgccggccgtgggctggaactttggccagcctgtcggagtgaaggatgcttttccttcaggtcatggcgatcagtctgtcacgggaaggacgctgaccccggcgctccccaggctgcacggtgtccctcattgctggcgtctggcgttcagtcactgtctgggcacccacatcttccccactctgtcccgtcctctttcttggaaaagctactgctgacgtggacttttttttcatgatcaccctacaaattcatttctctttttgtctttcactgtccagcactggagctgctggcagagccgtcaagagaaccggaggctttggcaactggtgccgctcatgcttggcgccagcgggcaggaggcagctttgtcctgcacaccgagacagtgtgcttgtgtatgtgagtgtgtgggggtggggtgtgtgtgcatgtgtttggggggtatgtgggatacggtgcgtgttcacatgtgtgtatgtgtgtgtgtggaggggtatgtgtgcatgtgtgtagagggtatgtgggatacggtatgtgttcgtatgtgtgtgtgtggaggggtgtgtgtgcatgtgtggagggggtatgtgggatacggtgtgtgttcgtgtgtgtgtgtgtgtgtgtggaggggtgtctgtgcatgtgtggagggggtatgtgggatacggtgtgtgttcgtgtgtgtgtggagggctgtctgtgcatgtgtggagggggtttgttcacacgtgtgtgtgtggaggggtgtgtgtgcatgtgtgtgggggtatgtgggatacggtatttgttcacattcgtgagggtgtgtgcctgtgtgtgggggtatgtgggatacggtattcacattcgtgcgtgtgtgtggagggtgtgtgcatgtgtgtgggggtatgtgggatacagtatgtgttcacatgtgtgtggtgtgtgcgctcgagtgtgcatgagtatgcatgtgtgcagaggtgtgtgtgtgaggtgtgtatatgcgtgtgtgtggtatgcatgtgggtgtaggggtgaggtatgtgtgcacacatgcatgtgcgtgtgtgtgtgtgcgttagatgcccacactttgtgttagtgacattctagggactcagtgcttctaggatccagtgactcgcaacattttgtaaaggcctcgcctcaagcacttccttaactcaactcctctgaagtccttaatgtttctcaggcagttttgtgcccagaaatcagggcagggaggggggtgtgtgtttccctctctgctacaatagacaagcagatatgaaatgagagaacagggcttgtgtgtggtttacatgctgcctggagatccagctctgaatgtgatgaagctggcctaggtctgaaaggttgaaacacagaagagaaattcaccaggaggacccagggcaactttcctttcaggataggaatctgattgggagtgtaggcaggaacgggttggctggctgggcgccgacgcggtgccacgggataatcctttagtgagccactgattggctggggggctgcacgggagacaggcaggtagttttggaggcaggcatctcttcttccgtctccgtgcccacgctccaggacaggtggtggctcagaaagcagacagcagtgatgggcggtgcctcttaggatgctgctgggtaaaggtgacttaggaaactgacagatcgctgcctccctcccttctatatcctttccacgttgatggtgtcctcacttaccatagtgggccatgtactccatcactgagtccatcaaactccccaagacccccaagtgcaagtagcttttactggattcagtctctcacatactcagccccagagctctttttttttttttttttttttttttgccccctgagacggagtctcactctgtctcccaggctggagtgcagtggctggatctcggctcactgcaagctccacctcccgggttcacaccattctcctgcctcagcctcccgagtagctgggactacaggcacctgccactgcgcccggctaattttttttgtatttttagtagagacggggtttcactacattagccaggatggtctcgatctcctgaccttgtgatccacccacctcagcctcccaaagtgctgggattacaggcatgagccaccgtgcccagcccagagtactttctgctctggcctgtgattctccgtagtgagtctcctgccactgttgaccctggggtgggggtgggggtggggggatactgccaaatacaagcctggcctcaatgctttcacactccttggccaatgatgacacaaggaacctttgaagtcagaatgttcccgagctcctgcccctgcagacagcgcaggagcagccttttcccacctgaggctgcctttctgggaatggccctgttgccacttaggtgttcacttgagcatctgaaatcgtttcccatgcatggacatgtgtgcatgcctgcacatacacgcacatatgtgtaaagcggcaccgcgtggggctggcagagcgactgtatccgtgttcgcacatctatgtcaaacagtctgctggcatagagtaagctttagataacagcgtgaaataaataaaaacaaagtaacacatgcccttggccttgaggggagggggaggcctttgcttcctgtgattcctcctggctctttgcggcagcatcaaaccctcagggcagggctcctagtctgtgtctgagcccagccctaccccagtgtcccatgctggagagtggggctggaggtccagtcaggcccagtccccagggcccctttaaagttagaaaacaatataagaggtttctgtgcatgggtacgtaaggggagaaatacccaaaaacctgtacagttccgagcagacgggtggtttcactctaagactccaagcaattcagaactgggccagaggggagctgagagggctccaggctgaggctcgggcaggcaggtggaaggagggaaaagggcccaacttgtccaccttctgacttggaagtaaggagccagggtcaccctgagaagagaaggtaaacagagtacaaagaggagaaggagagcagcagtgtgtttgtttcagatgttgagatcagttccccgcccccccattacagccctcgaatattttaaaatttaatatggaactatcaagcagaattcttggggcaagattttattcagatttgttgcattttagtggcttaaaatgtcattaaaaaattaaagcatgtttatacaaacttaaattatcagggtgtagcaactaaattgcctctaaaagcacccatttttaagtaattcaaagagaagagtgagaaattaggagtgtctgatggtgcagcacaaccttggaaggttttaaagaacagttaacaggtacaccgtgaccattattcttctaaaaagaaatgtcacaaatgaggagttggagacaggaaggataggaatattagaagaattggcaggtgattggaacattatcatcaaaaactagtgagaaaagatggctcgttcagggaattgaattaggaagattacagagctgatgccttcagagagtgcaagtcatgtatcttgttatataaaactacaaatgccttcgggtctcggggggagaggcgggtggaagccgcctttgggacggagggaatggggctccacgggggcaggcagatgttatctaagcagtgtcattctgtgtcttgccacatctccactttgcaaacgtgtctcatctcagaagatgaacagcaatgtcattccctgcttcttgatgttacagtgagaagtccttttcctgcagtcttgagaaacagtccttctgaccccaaggttgaaccaatagcaattggcgtgaaatacgcagtgacagtcgctggttaaagtggttggagttttatgggcataaacatgggtaaggaacggggtacctcactccctcccatgtcacccctctcatcatcccaaacacctgatgaggaacagcctggagcctacaaaggctcttcagacccacaccatcctgctggtgtctgttcaagatccacatacaaagcaacagtgctaaactgggagcgtctttttaaaaattactagaaggcttcaaagggaggtttagggggcaggatgctaagggagagctctggccatggtttgcttgctttgtgtacaaagttttcagtccagatgctcctcgtgtgttccgtggatgtgtgtccatgagggctcgcagcctctttatccctcatccatttcgggaaaggacgtcaagcacgtgctgggagactaaacagcgaagcctccgggatgttatgtgcaccgctgggggccaggcagtgtcagagatgccgagattgcagcattagacagaggtgctgccttcatggttctcagagtccagatacatgagcgcttagcgcatgggaaacattccccaaatcacaaagaggatgccaggactgaggaatagcccagggctggggcaacaggtttgctttgcagaatgggcgcttcctgtgcttgtggtcagctgccacccccctcagtgaaggtgccagctggtcctggagtcctggccactccttggagaagaccttcctccccactggcacccatcctccccgggactcactgcagccctggcctccttgtcctggcctccctggcctccctgccccaacctccctggcctccctagcctgcttccctggcctccctgccccagcttctctggcttccttaggttgcctcactggcctccctagcctacctccatggcctccctgccccaacctcactggcctccctagcctgcttccctggcctccctagcctgtttccctggcctccctgccccaacttctctggctttcctagcttgcctccctggcctccctagcctacctccctggcctccctgccccaacctcactggcctccctagcctgcttccctggcctccctagcctgcttccctggcctccctgccccaacttctctggctttcctagcttgcctccctggctgctctcagccactgcctcctttgcttcccctctcaggccattgggaagccttcctgactctccgcttggcaccacaggaaatctcttccctctgccagcttccagggctccctgtaactggtcccaccccatctacccacccctccagtatatctgcgggaccctgcccttgtgttcatccttctcacggggatgacctctgtcctcctccctgatagttcatatcctgcaggacccctagaccttcctcccacacccacccaaggcccttcttggatgccacaacctgcaccggagccctcctcttctttgggctccttgcagtgcagagagccacatggtggtgtctgtgctcttgtgttgccttctggattaggacctggcctcctggtggaagatggaacagcaatgctcccagagcctgcagtacccaggggcaggcagggctgagcaggagcggaatcactggacaggaggcagacacttggccagatgcgcacaggccagtgcgcagacagaatctcctcttgcagctgatggggagagtgggaagagtgaattctgcagttggtcagtcagacagttggttgaaatcccagctctgccacccactagtcttgtgatttaggacaaaccatttaatctttaaattcagtttcctcaaatacaaaatgcaggtaacgggcattcccttctcctcgggatcgataaaggtgtaatgaaagaatgtctatgaagcacttagatttgcacatggcatgtcatgggcactcaataatcagtagctaataaatatgtagttattattttgtgcgtttcagtccacagcatatataacagctggatgatgtgccggatgtgtaagcgatgccttgtcctcactgtcttgtctccgccttggtcacatcaacttggtcttgttcttttatctggtaaattttactggagtataaagtcatacagaaaatttcacaaatcactggtgtactgctcactggattttcataaaatgagttcaatgtgtaatcagcacgcagataaaggaacagaacctccccagcatccaaagcccctcatctctctcattcaattgccctcttcccatcccaggggcagccactctcctggcctctcacagctcagagaacctttgccattggggaacttcctatgcagggaaccacgtgacttcccccacctaaccttatgcttgtgagattcatccagctggtgggagtgtggtccattcattcccatctgcacaatagtgtcctgttgcagatgaaaacacactactgtgaagaatcttctagactctgattccaaaatttactagaaagctagtgtgatcaagacagcatggtactcacataaggatagacatatagaccaatagaagtgaattaagagtctagaagtgaacccatacttctatggccagttgattttttgacaaaggtgccaaaaccattcaatggggaaaagacagccttttcaacaaattgtgctgggacagctggacagctacatgcaaagaacgaaattggacccctacctcacaccatatacaaaagttaactcaaaatggatcaaacaccaaaatgtaagatctaaaactataaaactctaagaagaaaacataggtgtaagtctttgtgaccctggattaggcagtgatttcttagatatgactcctaaagtgcaggcaagcaaaaaataaataaacagtggacttcctcacaattaaaaatgtctgtgttttaaaggataccatcaaaaaagtgaaaaggccatagcatgacagaaaatatttgttaattgtatatataagagtctagtatcaagaatatataaagaactcttacaacttaataaaaaacacaaataactcaatttcaaatgagcaaaagttttgaatattttttccaaagaagacatacgaatgtccaataaacacataaaatctgtgtaacgtcattagtaagtaggaaaatgcaaatcaaaacaacagtgagaggccaagcacagtggctcaacacctgtaatcccagcactctgggagtccgaggtgggcggatcacctgaggtcaggagttcgagaccagcctggccaacatagtgaaaccccatctctactaaaaacacaaaaattatctgggcgtggtaggacatacctgtaatcccaactactcaggaggctgaggcaggagaatcacatgaacatgggaggtggaggttgcagtgagccaagatcatgccacggtactccagcctgtgtgacagagtgagactccatctcaaaaacaaaaaatgaaagaaaaaaacaaaaacaaaagagtgagattacacacccactaggatggctgtaattaaaaagacaataacaagtgttggcaaggatgtggagacattggaaccctcatgcattactggtgggaatgtaaaatggtgcagccactgtaaagaaaaaaaaaaaacttgtcacctcctcaaaaagttaaaaatagagttagcattagcatatgacccagaaatgtgactcctagggatctgcccaaaatagtgtgtccacacaataatttgtacatggatgtttatagcagtaccattcatagtagtcaaacagtggaaacaactcaaatgtccatcacctgaaaagtagataaccaaaggtggcatccagacagtggaatattcagccatataaaggaatgaagtccgtatgcaagctacaacatagataagcattggaaacattatgccaagtgaatgaagacagacacaaacccatgtactgtatgattccattcattctaaatccccagaataggcaaatctgcagaaacagaaagtattttattggtttccagagaataaggagaaggggaaaatggacagagacactaatgggtgcagggtttcttttgggggcaatgaaaatgtactgggttaaaagtgaagatggtcgtgcaaccttgtgactctactaacatacattgaattatccacctaaatgcgtggatttacagtatgcgaagtgtatcttaatttcacaaagattaaaaaccagcctttgaggtgtttccatttggggctattgcagataaagacgtgtgaacatccttgtgcatgtccttgatgagcatgtgtatgcatctgtcttgcaggtccgattgttgggtcatagggaatgcctgcaccctgctttatagatgtagtgtggtagatttccaaatggcagcacagatatcatcccaccatcattgcatgagcatctcagttgctccacagtctcaccagcacttgagagtatctatcttttccattttaattattctagagggaactgtaacttcttccaattctatctccctatcccctgtcccatgaggttcccaaagctgtgttgctgctggacctcgcttggtagatatgtgcatcaaatatggacagccgggaggcaagttccctccaaaatgagtcatgactccagaactgtgagcttcaaggtgagcctcagatgcaactaataatttacagcattgtggtaagctgtgcctgcaggggccaggtccctgtcctaggagctggtcagtgatttccatctgctctgaggagcacccacggttcagagcaggactccccagggcaggggcaggttctcccccaccccattggccaggacagcctggcctggctctaccttctgtttcagaaatcttctgtagagggtttcatttgaagacagagctatgatatatttgcacagcactaggtccatttctttctgttgttcttaggtgattttgttagggtcagagccctgatttccatttccttctggttcacattgcccttggactcccagctcccgtaggtgaatcggactctcagctgatgaagctaaattgcttctgtgatgtggttgaggcagggggcagtagaggaggcacaggctctggtgggcaaagacccagagccacagggctgcccttgaaacattatgtcgccactgaccaggacccaagagtccaagccctattttctcttaaagttaattgttcaaagtcacatgtacatcagagtgcagtgagtgctgggagagccataaggagcctttccccgtggggctcagcagtctggaaagggccccagccatggaactgggatttgttgcagaaacccagccaggctgacaacaggtcacccacagactctcaaagcggctgcctgggagccgcaaccagtgctgagcctgcagtgggtgggtcagccggcagagcaggagaaacactgtggatctgttgtgtgggtgttcctgtgtgtacacacatgtacatgtacatgcatgaacatatatgtgcatatgtgcatggtgtgaacatgttttcacacgtgcacatgtatgcacatgcgtgtgagagtatgttcgcatctgtgcatgtatgcgtgagttcgcatgtttgtgtgtctgagtaagctcacgttttacatgtatgtgtgcagacatgtacatgtgtgctcgtgtgtgcatgcattcttgtgcatgtatttaggtgtgcaagtgtgtttacatggcaaatatatgtgaaggtgccctcccagtattgcccatgtgtgtgcacacctgtgtgcatgtatgagcatatgtgagtgtatctgtatatgatgtctgcccatgggagtgctcttccagtatgagccgtatgtgtgtgtgtgtgtatgtgaacataggcgtgtatacagggcacatgcatggggttgcccttacaatacaagttgtagctgctgcttcatttgcttgtttctgagaaccaggcagcctccttgtgagtggtttctatgagtgtgtgcagaggtcattttaagagtgaagatgtatttatctttaattttggcgaggatgcggagtgaagcagtaagggcagtggggcctgctggcatcagccttgctttctcacctcacagctaagtgtggtgcaggtaactgggtgggacccaccagggtaacctttcgcaggatgtgcaggactgtcctgctacctggagcaggaccctctgaggacagggtctcatcctcccagtgcctccctcactctccagcccggtccatttgccatgacgatcatgccccacacctgggggagaagcagtccctttctgtctttctggttatgttcacctctgcagccatttgcacagagactaaaacggatttgatgtgatgaatcacaaaatcacaccctttattcgacaactccacataaatagcgattccatttggaatgaattggacccatgtggtgagttatgggctcattagagtagcagagcacattcctttatcatattaagtttatttaaatcacacataatgttcatttttagaaacaattcatacctacctttaaggagtcatcagtattgctccaggaaacatgatacaatcccgtttctggcaggattcacacggtttctagtcgtgtgacaatgtgattccattatgtcttccctatggggacagcccataaagattgattctacattaaaaatggtattaaagaaagacagcacattgtgtatgtaccgccctgtggctctgagcacgaagccgccctctctctgctccggtgcaccccatggtgggctcgccttggtgtaccccccatgtgggagacacagatgttctcctgcctttctcggtcagagcagccgtgaccacagaagtttgccagggatgccttgaacttcagcaacaagaatgtgcatttgtgcattggtgttttcaaagcttggatctgttctagaaaatctatccacccagggccaggatgatctgggcaaatgcaggctttgtcctcttgtgaattcccactgtatgtgtcaccagaattcagaacatagtggagaatctctcaggccttttatgattcagaagaaagaaatcatggagagagaggctccggggggcaggggtggagacggggatgacacagtcctccaggcagaggaactgtgttataatcaccactggtatatctgggtgttctgcacacagacttttgttaaacagcagaaggatcttttaagagaaacaatgaaagtccaaacagaagcttgagtgttttcttaactgtgccacaattgagaacaaatggaacaagggggcctcttggccatcacacggcgaagactctgtggtccaaaattcccgttttcatagcgtcccacctgacgacatgcagtctgcaacttatgcatcaaaatcatgctttctagaggccacccgtgtaagcccgcgtgcttctccagtgcccccagtggaggtcccccagtcttggtgccccccaccttggtgctctgccttgaggcaggtggccagtggctgtcctctgcacagctgctgtcagacaaggagggtgaaagggagctgtggtcggcccgtcctccgaccacaactccggggcaacaacaccgagaacacgtgaggcgccgccatcctcacaccagggctgatccccgcctcagtttggggcctgatgaatagaaatgtcactggagatggattttcaatttaatcgaaagaaaagcttctctctggggctttccaaatgtgaggtcatcccttgatgagttggagagaatgcttttcagttttagccttcctcttgggtgtgtgggtgttgggttcatgggtgagtgggcatcctgcaagccataagctaatactaaaaaggtcgggattgatgctggagtggacacgttctgtgatcgaagacaggatctttctctaaagggccaaggagtacgtattttaggcatcatcaccatgcagcctgtgtcccaatgacaacacactgccattgtagcacaaaagcagctgttggcaacacccaagcaatggaagaggctgccctcctgcaggaatattcgcacaacccagcggcaggtcccctgcagctgagagccagagtttgccgaccgttggctgatccaagggactcttaggtctgtgtgactttcactaagaccacacaagatcatgcaaaagccaattccattccatggttgccgtcgagtgggaagtaaattttatgccctccaggaccttggtctgctcactgcagacttctggtatagattaattgagtttcttcttgtgatagctgttatttggatagcttagaggaatgagaagagataaaactcatgagtgaaaatgccgctcttttacattcttgctccaaatcgcatctttgtgttagtggaatggccacacttttgggatatgcttcgatttcggcgggagagggaaccacggagcgcctcttgagaaggctcgttaagggcgtgaacgtgcagccacctgcattttaatcactcaaagacaaactcgggccattctgtgctggtggagcatcactaattctagttatacgataatgacgcggcgctggattttaggaattaggcctctgagatccattagctgtgtggtgcaccgtcgctgaatgaatggctgtattattatcaaggtaattcaaaacaaatttcaagctgtgacaataaaatggttcttgtagtaggttggggtttgtgctgaaattgccagttggaatgagaacagttatgttttcaagctcgagttttggtggactcattttaggctgactcactttcattaaattctgaacaaattttttattaatgtgatcatatcagacttggacaaactgtgattattgggtaataatgaaggggtatgtctttcaccccatttagctgctgggtggtttttggtctaagattacactgttcttatctatgttcaagatagagaatactcaagaattcacaccaagaaccctgtccctgggcagagttggtcccaaatctaggaccatcctttcaaaatcctcatgttagtggcacctgccccccaagtcccatttccatcccccttactcatgcttgatgccatcagtacccatggagaaattcttttcagcggcaaaagtgtaggtaactttgtaaatcctttatcttatttctaatgcaaaggggatagaagaggattttgtagctctctggggctacctggccatccctagagcccacactggcctgcggcctctggacctgcccccatctcaccagtactgcctcacgcagtgcaggagatgctcaggaaatgcgtatcaggcaaaagaatgaaggtcgtggtagtgatcatgttttgagaaacgctgcaggctccatcacaagagcacaagaaaatggtcccaggagagctgcgaatagcatcccgtgcgtcccgtctttgcccactaccctcaacacatgtcaatactcattgtagtaacaagaagtcattgcctgcatttaccaaaatgtccctgcaacacacacagcagcctcctgagaaggtctcacctccggagtggccagcatgccgtggtccccgtggcgagcaccgtggggccgctggatggctttgctgcctgccagctggccccagccttgcgatccctcactgatgaatcaccagctgtgctaagtggctttaaagactaaattattttcttcctgttaggcagacctgaaagaaacctgacagggaaacaaaagcactgctgggccgggcgcagtggctcacacctgtaatcccaacactttgggaggctgaggtgggcggagcatgaggtcaggagtttgagaccagccaggccaacgtggtgaaatcccatctctactaaaaatacaaaaaattagctgggtgtggtggcttatgcttctaatctcagctactcaggaggctgaggcaggagaattgcctgagcctgggaaacggaggttgcagtaagccaagattgtgccactgcactccagcctgggtgacagagtgagactccatctcaaaaagaagaaaaaaatttttaaaaagtattgctgctcgttggaatgctgatggccatcactggggctggaccgaaggggaggacctccgggagccacctgcaagagacggcgcgctgtcgggaggaaggcggtttcactggtctgatccagcagttaaagatcacccagttagagtctcctttctttttaatttttttttctttttttttttttttttttgacacagagtctcactctgtgtgtggcccaggctggagtgcaatggtgtgatctcggctcactgcagcctcccaggttcaagagattctcctgcctcagcctcccgagtagctgggactacaggcgtgtgctgcttcacctgattaatttttgtatttttagtagagacagggtctcaccatgttgaccaagctgatcttaaactcctgacctcaagtgacccacccacctccgcctcccaaagtgctgggattataggtgtgagccactgcacccagccggattctcctttctccctgcatgtcccagctggccatgccgctggcttcccggggcttcttgcttgccagtgcggtgtgcaccagctgacctggccttcctcggaagagtggaggccctcggctgcatgcactgccaacctcagagcaccacgtctcaaccatggaccctctgtccatcgacatccaacttattctgccatcaggcattaggtagcccaagttcccagcaacgagtgcatagaggagatcgaccctgccactcgaacttcggagtcgcttgtttgctctgcttatctggtcggcggagacaaaggaagaccccctgtggcagaccctgggaaccaatgtcatcagcatcccagacagtgaatccccccacctgcgggtgctccccacttttatcaaggcccgggtagcagatttaaagagcacgtgactttttaaattgctattttagtttcagggggtacatgtgcaggtttgtttattgcctgatgtctacatgtaaaacctcaaactatgaagatcctagagccaaacctagcaaatattcttctgggcatgtgactcgcaaccattgtttgaggagttttgcattgatttaagcttatttgaaactttatgggtgtgtgtcacagttgtgggggaagttatcctgaagatgcttccagatgccaaagccacgtttttaggagccacagctcagacggccctgggccaagtccttggccaaggttccctagcgggttacttaccccgccctgcactccagcgccttcatgtggaagacaaaggtcacagcagccccacccgcggggccctggcgagggctgagtgcctgagtccacagaggccttggaatgctgcccagcagggcttagcttccaggaacgtgagccatccccaggtcctggtgaccacctcgccatgaaggcagtgccccagaaggagcccgggtctcagcctgggggccctcagtctgtccatccggggatagtcctggccttcgcagcgggagctctggacctccatactggatcccccagccagcggacatggaaccagccaacctcttactctccccaacccggatgagagggacgggccggggtcaccgctgtgaccagccgtttatacccagatgagcagatgaccaggcaggggatgcagttttgtgatcttggtgatcaggccattgattatgccccgggcccaggtccccacccacaggcaaagcctctgaggtgcccgagcactccaggaatcatcctgtcaccatgctttccacatagctgtccccaccccaccacccccaagacctgggtgcacagactcaggaattcagaattatctcttttcgccattgtggtaaatatggggaatccagtatcacctctgttcatgtcctctgcatctggtgaccacacaacccactcctgtaggatgggaactgagccagagggcctgccagatgtgccacagggcttggccctgtgttttcaccacagccttaaggggaagcacaggcgtcatccccgttttgcagatgaaatgtgaaatgctagagcacgagcagtgggtgattgctcccagccacatggcgggtgcaggccaagccagggctggaggccctgggccgtccctcttcccgtctcctccaagtggcctgcgtgtgtccaatgtacttagaaaaggaatgatgctttaggagaatctggtagaaaacacaatggcaggtgggtttctgcctttgtcccagtgggttccagtaaaggtagactgtggcccgtgagcccaatctggcctgctgcctgtttttacaaataaagttttattggaactcagccatgcctgtttgttggcatcctatcctgcttttgtgctatgaaggcagagttgcaaggggctaatttagccacaaaatgagcatgtttactatctcgccctttacagaaaacatttctgacccctgctttaggaacatggacaagaagagaaaaacaacccacaaaggtttatagctcctttcctgtgctgaagagctggcccttctctgggccccagtggctgcatgcgccatgtttctgggcagtgaccatatgatggcagtaatgctgtgtctggaaatcctgaccccagggctcccagagagagagagggaccttcgtgtggagaggtggaccccagggctcccggagagagagaggggccttcgtgtggagaggtggaccccagggctcccggagagagagaggggcctccgtgtggagaggtggaccccagggctcccggagagagggacctccgtgtggagaggtggaccccagggctcccggagagagagagggacctccctgtggagaggtggaccccagggctcccagagagagagagggaccttcgtgtggagaggtggaccccagggctcccggagagagagggacctccgtgtggagaggtggaccccagggctcccggagagagagagggacctctgtgtggagaggtggaccccagggctcccggagagagagagggacctccgtgtggagaggtggaccccagggctcccggagagagagggggaccttcgtgtggagaggtggaccccaggactcccggagagagagaggggcctccgtgtgcagaggtggtttgtcgcttctttcatcttcaggacagtcattgcctgggaaactggggggattggtccgaacccaccttgtacaccccagacttggtgcgtccctgcaggatctgagcacagaacggcctgcttcagcccggctgccaggcctgcagagcagggagagtccccatggaatgccactgttcagaccacctgtggttgaacagagcaatacaggagtctgttccagctgctcccaccttgccatgggaatggttctctgatttattattttaattaagggcttttaagctttaatttaaaaagttaaatcggctctctttatatgtaaatcgtggttcagtgagttatcacacattgccagatgcacactgtcatcggatggaagagcactgtcctgtccgggaccccagtccctgagtcttcacggctcctgaagcagcaacaggaccccctgggatctcagcccagggatgctgactgaagccctcccaggagcacggctgggtccaggggcaccagtggccctgcactgtgctcacagtcttgtccagcggctcccggagcaacctctcctgacctgtgaagtctacacgagggtccgtggggagcccaggctcagcactgcccagcggcagctctgctcttagctccagagtccggaacaacctctcttgacctgtgaattctacacaagggcccacggggagcccaggcttggcactgcccagcggcagctctgctcttagctctggagtccccttgccggctccaggaaagcaatgtgaaagtagccgttttcacaaagcaggcactcaccatgttagcaatcagcttccgtttctgctccttgaaacgccttgggaagaaggacccttgtaggtgcagagtgccaagggtgtggagagctggccggcccaggaatccagccccaatgtctccctccttctccctcacttgctccaggtgcttggtgtcagcctttagaaaacattggtcctaattgttctctttcttttgggccgacacattcacactcagcaggggtgtgcagggtggtagctgctgctccaggggctgccccctcaccagcattccatgaaatagttccttccactacccgtggagtccagcaactggggccaggtcactctgccaggcagcagattctccatgggtcctcgctaggccaccctgctccacatgcctgcaaatgcagctcccttccagctgaagtgcctggcacccctcattgggaacacagggacagctcacctttgctgagccccctctgtgtggctctgtggagctgtgtcctttcgccccgtaatgggcatagggtgcgttatattctgactgcttggtagatatgaagctgaaacccaggcaggttctgcacctgttgtattaacaggtgatgcgtgcagtagtggggcctggattacaacctgccttcttggcggcaaaactctgctttcttccattggcctctcaacctacccagaaatgagactaattctgccctctccttccctcattcacttctctgtccgtccctcaatgcacctcctctctgtcgtcactgccctcagtctcctgtgaggacagcgtttgtgtttctctcagtctccctctcctttctcttataaggacatcagtggttgggtttagggcctaccctaaatccaggacaacctcatcctaagactctgagttacatctgcaaagacctttattcacaatgagttcatatctgaggttcctggtggacgtgaatttgggagggggcactgttcaccccactctggccattaagcacagtgtgtgtggctttgtgtgtgatctgggtgggatgtttgtcgcttcctaatctcatgctgagatgtgatccccagtgttggaggcaggcctggtggaggggattggatcttgggggtagatccctcatgaatggtttagcgccttcccctcggtgctgagtgagttctcgctctgagctcacgggagagctggtcgtttaaaagactgtggcacctccccctccctcgtgctctcactctcaccatgtgatgccctggctccgcttcaccctccaccatgattgaagcttcctgaggccccaccaggagcagatgccagcaccatgcatcctgtacagcctgcagaaccacaagccaaaataaaacctctttctttataaattacccagcctcaggtatttatttatagtaatgcaagaacggagtaacacatgtagataaccccaccctgcaattccagtggacacgagctgggatcgggaaggaatagaaggtgggtctgagagtggacatagccctccctcagggattcaaacaagcagcccttcccatagcaggcgaggtccccgggggagatgcgggagcatagggagttgtaaatccacagcattcactccacttggttttcgtactgagcctctgaaatgtgaacatgttaccatttgttttcatgaggattaaaaaatatcacaggaaagcagccacctggtagacagcgggtacccaacacactgctgctggatttgtttctttgctgccactggtggtgctcttggtggtggtggtggtggtggtggtgctcttggtggtgctcttggtggtgctggtgctcttggtggtgctggtcctcttggtgttggtagtggtcctcttggtgatggggtggtggtggtggtggtcctcttggtggtggtcgcggtgctctcggtggtaggtggtggtggtggtggtggcggtgctcttggtgatggtggtggtggtcctcttggtgatggggtgatggtggtggcggtgctcttggtggtggcggtgctcttggtgatggtggtagtggtcctcttggtgatggggtgatggtggtggtggtcctcttggtgatggggtgatggtggtggcggtgctcttgctattgttgttgctgttctctgtgaggcctgatcagaccatgtaacaaccctagaaaggctatgaggaagagctcagccacctccttggggctgtttcaggcatttcttccctggcatctaggtgtcccacttgcacacctgaggcccatgaggtcccatgccatgcagaggttaagctccatgggtggtagataaattacccaaacaggtgatccaatgtctgcatgcagttgcagctggggccacagacccctacccaaaatgattgctcacccctgagaacagagtaaggcagtgccaagatacacaatgcagggaaaggctccagcagaccctggcagaggagaagcctccttccacgtagggaacagcatctgcctgcagagggctgctgccaggagccagccgaggctacatgcctgcctggacgctgtcatgaggttgctgccggggttgctcagctgcctggggtgagggtgtctgcatccaccccctctgtcctcatggggttctccagccccatgtacactgttgcctcccacctgatgggaggaccctcgtcttgtccccgttgcccatcaagtgcctgccaccgacagtggccccagccctttctcgggtgcacagtgccacagccggtgggtcgctggtcctctgcttccctggtgcctcgggctgagtctcctgctggggcatcactgggctgctctcgtccccgacagactcacccacttcttccacccctgcatggtcccagggcttcctgcccttgccgggcccatgtggctgactcctccgctgtcctgctgtttcccaccatgtctgaccatgagccgcctttttaaggaaagcagattggaccaagtgtttctcgcctttccgttgcttttggttcttccaaaggttttgaaagtggttggaaaacattcttattttctcagggaccattttcagcttctctaccaaggatgaagagttggagtaaaaatgaattacaaactggcagagtcagtatccacctatttaccacgagccggagactttcagtggttgccagcgtagaacgctcatttttattaaccctatttccttcaagtgtctccttccatggagattgacaggccccgcacatggacatggggagagaggaggtctctgtgtctgcagcgctctgacatcctgcaggacgggacaaggtggccccgaggacccgtcagtgcccacggggtgcccataaaactttagcagtggtacatatttacccaaacttcactaaatcactttctaatttaccagtcattgcttgagaggccggaaagattggaagcccaaagaactgagcagggccgattctaccgggagaaagggtcaccgagacactcaacagctcgcttatcggtcactctccgggctgcgcctcctcggggagttctgggtttgcgcgggaggctgccgatggcacgcggctcacagataatgcgggaatggactgcgtgtcttcctcccagtgtcttcagcacacggctgttgccagcggcggtgatgggcttgcctgcctcgggggagctgatgggaggagggggagctttgtggacactgaggagctctgtgaggtggagagcagctctgttccaaacgcccatatccgttagcatgggactcaacctgtcaccctacatcccaccaagctgccatccaaaaatcactgtttagtgtatctgttaaaagtagcatgtttcaaattgcacagaaaattccgaaagctgacagcacgcagctgggcacctgtctccgagccccccaggaaaggcctttgtaagctcttctagctggggacggcagaagttaccttagtctatttaggctgctacaactgcagacagactgggtggcttagaaataacagaaatgtacttttcacagttctggaggccagagtccaaggtcagagaaccagcagattcagtgtggggtgaggtcccgcttcctcattcatagctggtgcctgctcattgtgtcctggcatggcaaggggagagggatctctctggggcctcttttataatgtaattaaccccattcaggagggctccaccctgggccccttccaaaagccccacctcctgacatcatcaccttggggcttaggtttcaacacacaaaattcgaaatttgggggcacaaacatttagccatagcatcaacagactgttgcagaccatgccgggtcctcccctggaaggagcagggcagaggggaaatgagctggaggcatgtagaaataggccaggtgtggtggctcatgccagaatcccaacactctgggagactaaaacgggaggattgttcgaggctagaagttcgagaccagcctgggcaacacggcaaaaccccgtatgttaaaaagttagccaggtgtggtgacacacacctgtggtctcagctgcttgggagcctgaggaaggaggatcccttgagcccaggagttcaaggctacagtgagctatgattgcaccactgtactccagcctggatgacagagtgaaaccctatctctaataaaaagaaaagaaaatatatttaaaaattttaggtagtcatagaggagatcaaaataacagaattaatgcttattgttaattacttttttatggaaacctaaggaaagaaaagcaaaggtctagaggcagccgtggcagggtcccctttaaaacagatgaacccttctcatgagaatatagtgttgcagatacggtgacagggttcagctgtgtccccacccaaatctcaccttgaattttagttcccataatccccacatgtggtgggagggagccggtgagaggtaactgaattatgggggtgatttccccatgctcttctcatgatagtaagttctcaccagatctgatggttttataaggggctttttcccttcgttccacactcattctccttgctgccgccatgtgaagaaggatgtgtttgctttcccttctgccatgattgtaagtttcctgaggcctccccagccatgctgaactgtgagtcaaacctctttcctttataaattacccagtctcaggtaggtattagcagcgtgggaactgactagcgcatatagccagacacgtggatctttttgatgatgtctggaggatactacaacaaatttatgcattcttcctggtcttcccgccttcctgctatgctccagtcttggcgccttggcacttgctgttccttctgcccagaacatgcttccccacccagctccatcctgtgcctcctttgggttttggctcagacaccgccttttaatggggctctcctgacttccagccttaggcttgagctgtgctcttccctccaagatactgggtctcctggcagccatgttccttcctgggaggctgcagctcacgcacctgcattgcatgagtggattttcttcactgctttctcccccaatgagagtggaagaggtgacttttctgctcagtcaaaggtgcatcttcagtgcctggcacacagtaggtcctcgctcaagactcaacagatgaaagcccaaacctgaaatctgaaatcagtgacccagttgagggaccactggactgcatgggtcatgggggcagcaagccagtttgtgctctctggagcctcagagaccctggggttcaaatcctggccgcgccacttgtcctgctgtgggtgagcaactggccttccccgaaccttggttttctcatctgaaaaatgggcctcatattgctcgccttctggggtggccatgatgattaactgagatgagaggcgtggagtttccagaacactgcactgcacatagtaagtgctcaattaatgctagctctgattttcatctcttgtaattctcattttaactcttatttggagataattgtaaacttagaggagttgcaagaataagacaaagaagtctctgattttcttcactgactcatcacctgttatttcccatgggttctatacacaatgtctgctctagtctctctgtctcccctttctctctctcacatctatctcagaatacacacaatattttccctgaatcatttgagaattagttatggatatcacacctgttgcccctagatacttcagcatgtatttcctaagaatgggatatactttaactacaatgcaattactaaattcaggaaatgtaccaatgatacgagattcatatctaatctagatattccagttttgccaactgccccccaaatttttttttgaggcggcgacctcccgctaatcaagatgccatcccagagcagtcattgcatttgctgtcacgccctttcatctctttagtctgaaagattcctgggcctttctttgtcttgcctaacactgctgttcctgcagagcccaggctagttgttttctagaatgcctgcagtttaggcgcggctgatgtttcttgatgacacttttattattttcatcagtgttatcattacagaattgagggcctcattcgaaaagtacaaggccggttttctgggtaaaacactcctctctttagctggccgctcactgtctcggcaccgattttacatggcccattgcttgctggagtgacatgaatggttactatggcgccgttacgcatggggagttccagggaaaatgagcttcttgcctaaaacaagtgcaggaaaatattgagaactatcttgggcctgtcacttggggagcactgtagaaggttctggagaaggcattgagactataattctactttaatgagctgggctacctagattctatggtacagcaagagaagctgtttgtatgcacctgtatgtacgtgccttacttaaaattcagaaagaaaatcttcaggtgccagaattacttgtgaggctggtgaagagtgaaaagccacttcccaggccagacaggaaagagtgccctggttgggaccagacgggcctggctgcagacgtacactttgggcttcagcagccctggtgctgccttgagcttgacccgaattgcttcttcccagaggctgggtctccctcgcagcccctgctctcaaggatgggaatgagaaggtcgatgacaaggcacctctgctttacatccaagcgttgacttttgtggcttcctttaccccattgctctgccctttaaagggtcctggtgtgtttgggaatgggacagacaattttgtttttcacaatggtattgggctgtggatccagaactcaagttccagaggaaagcgatgccaaagtcaacagggatgcttcacggaggcagggaaaatgcaggaggtaagatccttgagccacggcttgtgatgatgccactgtaataaatgctaattaccttctctgccgcgccagggggttgctgctgttttcttccccttccaagtgtgttgcgtttggatgtgtagtggctgttaagaagtttgtcagcttctcctaagaaaacgtcagtatggaggcgcttaagtaggtctgtgtgggtgcagggctgcagggaggcagtacattttgtagctggaagattcgccgcctgtgtgtggggatgcagagagtgtggtggatacctagctgttacctggctcatctccaagggggcaaggcctgtgcaaggtggtggggtccaacaggggtttctcccccacatcctcggcgtggctgtgtgaataacccgcctgcagggtcctttcctgtgtccagcctcttcctccagggacaccggctttgaggatgcattggtcttttgttctctgtggtgtttcccttaggagtggtctgaaacagaatttggaccctggtccttccacagccttttgatgtctgggaggaccctggcatcctcaggcacactcaggtgcgtggctgatgttggtgcagaaggactcgccatgagccgaaggtagacagtgctggccttgacatcgggtgagcatctccttgatgcccagagggtacctgggctgtaggtttccaggcgccatggcagggagtgactgcaggacccagctccgtgggccacgtgatcagagcacggcaggtgccccactttacaggcaaaccctgtccccaaaacccacctgtgagggaccagtacaggaactggcatgggtctttctgcagcaacagggtcctcaccgcccctgcattctatgccagctcccagaagcctggcaagccccagctcccactgaaggaccttctataggagctgaaaatgaaataagactacatggctgtggtggacaggaaggacctgcctctcctcctccctctcccctccccttctcactctttccctccccttcccacccttccccaccccttcccgcccctcccctccctgcccccagatcctcaggaactctcagaatcatgctgcgccaggcaccacaccatgcaatatcaccgaatcacatgtggtgtccctacctcggctctgtgcagtacatgctcatgttttgttcccatgtttcagaggaggaaactgaggcacagagacttcagttccccagggtctcacagacaaaaggtcaggagctgggattcaaacccagggacctctgccttagagcccaggcccttcccgcgtgagtgagacagaagcagccagcctgagccagccagagtttttatcctgagggctgctgcctccagaatgcaggcttcacttacgaaggaactggcagccgtggggatctggggggcctctcttgggcttggggccagtcatatcagctccgtgttaagtccaatttcactttaaaatggattttcctgtttccttgaagtgtgtgtgtcccttagactaatcatagatagataatacatgatgttatatgtgttatatctaaatatacaaatattatttaattcatgggaatgaaggctgaagtttcccaagtgacagagcaaaagctggagtgggagacgcaagggaagggacagaggatgtttgcctggattcaaagaagggctggcctggggtgcagtcagcacgtcttgaaggactgagggaaacggccggctggggtgagcctctgccctctctcctggaggagggggaactgcaggtcctcccaactcctgccctgccattcttaggaagcatcccctctcaggacccacataggcaatgggcagatccacgctgcatggtgaggacacccagtcctgaacaaggcccccaggacagcgcgtctttgtatgaaaggctccatatttccaccatctggatcagtttgcgtcacacaaaagaggagtccttctcagcttagcattgaaggctgacctcagagaagacagctcctagaggaatatgcagccccaaggggtcagtcttatacagatgattcctctttcagaacactatggatggatggatggatggatggatggatggatggatggatggacagacagagggagagatggatggacagacggatggatgatggtcagatgaatggatggatgggtagacagatggacatatgggtgtacagacatgggtggaaggatggatggacggatagacggacggacggatggatggattgatggatggatggatggttggatggatggatggatggatggatggatggatggatggatagatggttggatggatggttggacggatggatggggtggcatgtgggtttccctttgcaggtcctacccctgcacagtcctttcttcagagagagtgagctgatggggtgggagcgtcctatttcagctgagtgttaaagcccagagaatagaaccccacccagcagggaactgaagcaaagggaacaccagcctcttcacgtctgggaaggagagtcaaagtccaacgactgcacagtccctggcctggtggatgcccatggctcttattggcatttgccttgagatttgctcatttcagaaacacaagttgagtattttgaggtttttgtagaaatgtcacctgctttggcatctccagaagcagaaggactgttgctataattagaccacctgccagggtggcatccggaagtggggcatggagagcgcaccatcatgtctgagggtccttgggtccctgttggcatgtttggtggagggggtcgtgtcccacagtcctgaccagcgtgggcaccccagggccatcccaggagcctcggggcctcctggcttgcagcacagtggccctgatgttccgctgagcagcatgagcctgaagccagagctgaccccccatccacacggggttcctgccattcctagcaagaggaaggggcaacagccgatgtgctctgggccctcccatggcagaaatcccatcacatggcagctacggctgtgtatataaactgcatataaacacaattttgataaactcaaacacaggacagatggaagggaaagctgtgtgctgataacatcttgagccctgccaggagctcccctcgctcacctccctgcagccccttcctccctccctcaggagaaacagtaggctctggcttgtagctgctgcagctcctgaatccagctgatgatctgagtgcctgtgagggccccagaagccccacgggcctgcgagtggaccttctggccagcgaggacccacagccctggggtggcttcaagaacccattcaccagctggccccagctggcctcgtggcctgggcccctcgcctggagcttgctgggcgtggtgaccacaaaggtgccttccctccccatctccacaccttgcacacatatagattcaaaagagcaagcagcaccatgctgtagcccagccaaggctaatattcttactggggcctgctctcactggcccagccagcaaatgcctgtgtgcctcaccatgcaaggatgtgcttggtagaggccccgtgggccccgtgtgcaacgtgaaatgaagtggacgtaggcatctcactgcagtgggagtcatggagcacctcgaggggagagaaggcacagcctttaaattgctgccagagacagagtttacacagttcacacgtacagattcaacctgacccccacccccctttctccttcctgccttctccccatttgtgaatgccattgcaagcttgtggatcttatttaattacagagaaaaaaaatggtctcagtgtaagtataaaaatattgcagaggacccaatgtgagaaatactgcgtccggccactgagaaggtgccacctccccacaaagcccttgttccaggacaggctgcctggatggaagtgctccggcctctccacaggttgggggagtcacatctctgctttaggggctggatcctcagctcttctctgtgggctctggaccccttataaagctttggaccaagtccagggttctcatagaagtgccagctgccatatgcctgagccatagtgagttaaatgcccacaagcagtgttccagtgagtggaactccacctttgctgggaaggattctctcaggacagagcaaagataagctaaagcagtttgcacacctgatgataaactcatgaagagtgctgccgtgtgaagaaacaccacgctgggaaggtgcggcacagggtctgagctcggggttttgttaatgaggttctagcaggtagagctctttcatctgcaggtgacaacactgaattcaaagcggccaacacaaaaaagctaagtgccagagaaatccagggtcagcttcaggagcagcttgatccagaggctgaagccattaccagggcctagtttctctctatttccactacctctaggttgactcttcagtcatgatggcagcaagctggcaacgacaggtctaagcctgtgtgttcccaagtttaagttgaggagaaaggagagaggtttttcctggtattgttaacactaatcccagggtatatacttacgggttacacacagctccagttttatggcagacaccataaaacaaaggttcttcctgtcagattcagtgacacatttcacaaatatttgttgggtagtctataatggtggtagaaagacacagacctgtactcgtggagtttaaatctcttcgtgacagttattaataaaatcttggaatgaagaaaaggcaatggagagaagggatcatgattctatagaacagggcttagcaacctggcacacacgccatatctggccctctgcctgtatttgtaaataaagttttattggaacacagccacacccattcatttacatattgtctgtaactgctttcattctgtgacagcagagttgagtaattgtagtagtgaccttacccaacctgagagatttattatctggcccgttacagaacatgtttgccaactcctgctgagcagcatatgataaaagaaattgacccagatgggaggtaggcacagcttccctggggacatgtgagccacccaagtctcaggaataaataggattcaactctgccagtaggggagaggctgatgacatgggatggggctggaaagacaggaaaggtggctacctcaagggcttcgtccttgggttttggtctaagacatggtctaaggattgactctgagtaggaggaaaagggagggaaggagaagggacaagtggaggggaagatgaaagagggggtccagagggtgtgctccccattcggaggcacgcagtgtgggctccgaatcaaagctgccagaaagaactggagcacagctcctggtagcgtggcttctcagtgtgggctttattttgacttttattttttgtgtgtgaacataaaacagttcttcctgcagcaagacagcgacgtgtcagattcatccttgctgggtcacccaccagcagagccattaaccctctctgtcatgatgcttccccagctgatcgtgtttgcagctggcaggtcagggttaggagagaataaaggttccttgtgctgagaaacccacccaggctaatacagattaactgaccaccctaacccctggtcttggcttcactagttcctacttgacaaaccaagctgattacccatctcaccaggatctaggacagcacctggcttggagtaggagtaggctggcaaaaatatgtctgtaccactgcatcccctccctgaccggaggcagacatcactaatcgatcccactctcttctatccctcacgtgaggcagacatcacttatcaaccctgctgttctctcctctgggccagatggagccttgtgagttatctcagctctgagctcttaatggccactgctgccactcagcacccaggagaagcgtgttcacccctctaatgctgggtgctcagaaatgtcaggcgaatgaagtaagagggcctgtatgagtgcgtggatttctctgtggcaaaatgtgtacctctccacagtttgtttggaagactgaaaacaccaatccacagttagccccattaatccttgggactctagggtcttgggagatttcattatttttaatgccagagaagaatgtcattgcaagagccataaagtgcagtaggaaattaaaaagcaacaagggaaccccagctgatggctgtaggagtgcatggaaacattcacttgtgtcaccacataaatgttttgtgtgttaaaggatgcatggatgttttgcatgttgaaggataagtagatgttttgtgtgttgaaagacaagtggatgttgtgtgtgttgaaggatgagtggatgttttgtgtgttgaaggatgagtgtatgtgtgtgtactgaaggttgagtatatgtttgtgtgttgaaggatgagtggatatgtattgaaggttgagtgtatgtgtattgaaggatgtgtggatatttgtgtattgaaggatgagtggatgttttgtgtgttgaaggatgagtggatgttttgtgtgttgaaggatgagtggatgttttgtgtgttgaaggatgagtggatgtttgtatattgaaggatgagtggatattttgtgtgttgaaggatgagtggatgtttcgcatgttgaaagatgattgtatcttttgtgtatcgaacgatgcatagatcttttgcatgttgaaggatgcatggatgtttttcatgttgaagggtctgcatggggaaaagactcaatcatggtccatgagagctgagctgaatctctgattttcttgggcacaaccatgggcctgggttctctggggtcccaggaaggatgggtgggttggtgggtgggctgtgtggggctacacatttgaaatgcagcctatggttctattgtgttccagatgcttgcattggagggagaaggtgcttctccttggttgattaaatctctgggtggcggccctgggcagccccaggaaaacatgctgatgctcaataccaagactatgtcttgacataatgaacatttctgatccctggctccctgcctgtggatcatctaagaagcaaactagcctgaggcaaagctgtgcatagggaaagcttgtcttcatttctctccttaatgtctccttccctccttcaagccccactccttccctgaggccccctgtccccacacagcctccccaccatgcaggactgccaagcttgcctgcccagccaggaaacctctgcccctccttggcaaatctctctgtgtcccgaccctcagctctactcaagttaaggtgtcattccccatatgtcctctctgccagctgtcacctgggaagggccagagcaattcccaggggacctgttacctgtatgatccacccctgttggtgaagagagaggtccttttacccaccaaagagaatggctactgagaatgtgttgggcaccagggagaggccagggcactgggggggaatgacacactgccattgagagttatgcagacccaggtaatctaagggtctttaattttttgcttttgtcagaagattctcataccatagcattctgtgatttcactggatgtagctgttgactttctctacaaattagtgcaaaataactggggattttctcacgtcccactggttgaactctgagcaatgtgtgaaaattatagaaccatcatttacagttcatcaaagaagaaaacatctctacagctcatgattttccacatgtaccagtaaccacaggaagatggttccctctcagtacttggagctactcacagagccgactcaaggggtggtcggccaggattctcaccaaggacctggccacctctcctccatctcatctcagccttgcacttgctgtgcatggaaagtctgggctgtgagtgacaccaaacaaaacccccaatccaactgatatgagctaacatcactaaaaatattgcttctctcatccggtccattctgccttacatcatgtttttagtctttagtttcagatccatatacgtggcccaggacaagtctagatcctccggtcaagcaataagacaacagacaccctgccccatccaagggaagagagggcttctttctcatccattcggtcttgtgggaaggaaaggatgcttttctttccagtacccctgggctgggattgagttccatccccgaccctgaccgtgtgctgagggatgagcagccgtgatcatcctcagtcctgcggggccatgcatggcacagacaggcgtcctcccactcaaaccccacacctgagggtggaggatgggggcttcccaaaggaaatccagggtcccaaatggacaagtaggtactcacactctcacaattcttccaggactcctcaaaactcactttaccccactcgagcaggggagactctactagcagccagccaggcagtcggggagttgcctctaaatctccctcgatggagatttttttttttttttttttgagacggagtctctctctgttgcccagtctggagtgcagcggcgtgatctgggctcactgcaacctcctcctcccgggttcaagtgattctcttgcctcaacctcctgagtagctgggattacaggcaggcatcaccatgcctggctgagttttgtatttttagtagaggcagggtttcgccatgttggccagactggtctcaaactcctggcctcagatgatcctcctgcctcagcctcccaaagtgctgggattacaggtgtgagccactgcacctggcccagatggagatcttaaagtctacccttttagcgattccagccccaggttgtgttccctgaaaacagaggccacatctggcttatctcccacaacccccactctgccccgatgcagagcacggagtaggcacccgatgaatacttgtggagttggattgagctacgaatctccatgcaaaactagatgacatttgcctccccactgaaacttcagtaaaattgaagtgtaaggctgagtaccaagtatgaatgcaaacgtccctctatattatagttattcaaaagctcctagagccaaaaatgtactgcctttttttgtaaaataagatggctaattaaattgcatacactttctgaatttaaaaaaaaaagctgtaaaataaacatctgtgcacttgaggcgcatccagcaccttccccgccagtcacatgtttatcagctaggaagcagctgactttgcagtaggtaacgtgccctcattgtttacagtgcaacccaggtgaaggcctggacttacggactcttacactgctacaaaaaaaaaaaaggaatctgtataaagtcaaggcaaacttctgcttttctggccaggcgcagtggctcacacctgtaatcctagcactttgggaggcctagacgggtgaatcacctgaggtcatgagttcgagaccagcctggctaacatgatgaaaccccatctctactaaaaatacaaaaattagccaggcgtggtggtgcatgcctgcaatcccagctactagggaggctgaggcaggagaattgctggccacccgggaggtggaggctgcagtgagccaagctattgtcactccactccagtctgggtgacagagcaagactccatctcaaaaaataaaataaaataaaacctctactttaaaaaaaaaattgcatgtgttttttgacaccttcgtaagtctctggttgatgcatgtagacctctcacaccttaactagcagcgtgcatggcccttctcagctgccttgctgtgcgctgaaggcagcccattggtttttcaggttgacgctctagggggggaaattagcccccttatgactcctgctggctgaagcagggatccgtgttatggaaggctctggcgtctttgtttccagaccaccactggtgacaggcgttgggcgcacgaaatgagccattagcaatgggtggcgcctaatgggggcttacaaagtgggccgaccccagtcccaactgtgttcacgtggatgatgaagcactaggaccatgactcctccaggagtggatgtgagcccgaggccttgcaagtcccacaccccaacaaacagcaggacccgaggacctgaggataagtcagagtctgctaaagagagtccgtcctgaagcatggattccagacctcatgagcattagggcttctcccaaattaatggacaagggcactatccaaaaggaaactggagccagggttctggcctctgtgtgctgtaggcaggggagggagcaggtagggtcttcctcccaggagtcgccttgcttcccgctggcctggtctgcagaggaggcagcaggctcacccaggcaggggaccagtgggatgtacttgccagggcctggctccagggatccgtgcatgatgtctcgccatatgtattagtttcctgtggctgctgttacagatgagcacaaaccaggtggcttcaaacaacagcggtttgttctcttgcagttctaggggtcagaagtccagaatcagcctcactgggctacagccagagggtcaggagggatggctcctcctggaggaccctggagaattcatttcctcaccttttccagcttctggagacgtgttcctgggctcctggcccctcctccatcttcatggccagtgaggcggcctgctctggtccctctctactccaacatcacccctcctcctgggatggtccctcctccaccctcatggtcagtgaggcagcctcttccggtctgtgtgctccgaagtcacacctcctcctcggacccgccctgcttcctccctcctgtaaggacccgtgatgatgccctgtgcctgggctgcctccgtgacccagggtaatctcccatcccaaggccccgactgcatcagctctgccagggtctttggctgtctgagctgtgttcctaggtcctagggatcaggacatggacacctttagggaccgcttttcagccccacaccatgcttgtctggaatgcctggagccgctaccgtgaggtggaatcgggaatgtggcagctcagccctttctgctgagctcccgccgtctccccagccggtagacctgagccacaggcacctcctcggccctggctggcctgcctgagggtcccagcgttcggcatggctgagctttgccctcaagtctcagccatcatgtgggcgcctcctcagggcagcctgtgggaagagggtgctcccagccctccagcctggctgcgggtgatccactccctgttttactttgctcgtggccatcattaccattggcggcatgctgcccatgccttgtgtgtgcacggagactttcctgtccacctgcccctccctggtcatcccaggcctgacctctgcagcttcttcctaatgccgcctccccacctccaatcacagaggcacacgcggctttgcccttgatttttgagatgtttgcctccttatctgtttccatgagccaggtgccctgcacggatccgctctcctccttattgttcaagcgcagtgaaaaaggcagcgtgagccctggggctttcccagggccatccccctgcctggggccctgtccgcaagtccttctcagaaccatcccatgtgcctgtccctgtggccctgggctccaggctaactctctggaatgttccaacctggtttctgggcaccagcagttccctttggcctgtagacttccctcccagtgcttccggggagagtctccccagttgcacccagtgccctgagagctgcacctagagcttcttccgtcccctgcagggcctggtgcggtggagcccaggcagtgctccctgcacctgtcaggagcctgtcttctgaggctggggacacaagccagccctgcaggctccacttctccccagatgtcctgttggtgcccagcacgcctgcccttcgtttctttaacagttttattaaggtgtaatttacatgccctacactccactcatctaagctgtgcaaatcaacgatgtctacattcagagttgtgcagccaccaccccagtccattttagaatgttttcatcgcctcacaaagaaactccacacccttggctgtccgccttctgcgcccccatggcccccggccctaggcagccactaatctactttctgtctctgtcgacttccctgttctgggcactgcgcatgagagaattgtacagtgtgtggtcctactcttggttttccagatgttcttggtgtttgtggtggaggtcagaggggaggtgaagagaagagggtaccgtgcaacagaaggctctgcggggggacagagggctctgcggagggacagagggctctgcgggggggacagagggctctgcggagggacagagggctctgcggggggacagacggttctgcggggggacagagggctctgaggagggacagagggctctgcggggggacagacggttctgcggggggacagagggctctgtggggggacagagggctggacgcaagaggtggccaggtggccagatggtgctggccccatggtcatgtctgggtgcttgcctgtccctgtgcagagagcagtgaggagcatcagatgtttgaggggagacgggggttgtcacacacgcgttctgtgcagaccattccctgggtcccatggaaggcatccaggggcaggggacagaggcagctgcgaggtggagctgagctggcatccagtgggagcggacaaggctggggtgaggggttgtccctgggagcccgtgccctagagggactaccccacacatggctgggtgcctggcctgatctctctccactttcctcgttgacatcacattgccatccttcgttccctcctcgtttaacatgtaggggttatcaactttgatatcttattactcagtgtctatgagactcctctcctgcctgcccacatgtgtctgcacctgcactgaagtgtggacagcgtgtcgctggatggaccagcccgtacagccacacactccttcaagatgacagagtgacttttaaaatattcactggggcaggacacggtggctcacacctgtaatcccagcacttggggaggctgaggcgggtggattgcttgaggccaggagtttgagaccagcctggccaacatggtgaaaccctgtgtctacaaaaaaatacaaaaattagccgggtgtgctgttgcatgcctgtagtctcagctacttaggaggctgaggcatgagactcacttgaactcaggaaacagaggttgcagtgaaccaagatcacgccactgcacttcagcctggatgaaagagcaagaccctgtcttaaaaatatatgtgcgtcagtagagaggttccctgctaaactccttctagtggctttcctacatcaagtctctaaatgttgcagcctcagacagctcttgcacgtgccttccagagtctggaatgttcgtcctggcttctgggtactgacagacagcatcgtcgacccctgcagatcaatattgagaaggtctccctcagagaagcctctcagacaacctcacaaactagaatccctgccctttctgctcatcccagaccgcatgcatttccttcctagctcttctcgccctaacagttctgcctgtttaacaattgacctgtggctgctttctcccactagaaagcccactccatggagtgggagagcccctgtcacatccgctgctgtctccagtggacagcagggtacctggccacagccttggaggtattgggtgctgggggcacctcggttgaataaatgcatgaatagatttttgctaaaacaatgataaaatataacacgagctcagcagataaccctgtgagaatgtgtgcttagtgggggtggggcatgtggattagagaaagctacaggatcaagtttagggggaaagataaccctaaggggaaggaagcagggacccagagcctgcagggggctgacagctgcgaggctaacgcacggggcgcgctgcctgggccagcagctctcccgcactgcacacttgtcgtctgcaggtcacagtgagacccagtgagatgagcaggtgtctgaatggagcctgctcctaggagcaggggcatttccctggaaagccatcgccgatgtgaggcccctccttccaccgcccctgcaggcctgtgggcaaccactgctgcctctgagagctcgccaggcctggcttccctccgcttctccacctgcatgtgacagataaggaaaaccaggcttgagagtgtgagaatcttggctcagggtgaccaacacggtaagtggcagagctggatcccagccacaggtctgctctgaaacgttccaataaaacgatcctgctgaaaagcaccatcagcatggatgggtgctgtgcagagcagcaaggctcactccagccgaggggctattggtcatttccagcgttttcctttgaccttggggaagcccttcccaccctcagtctttcttgccacaccatccctcttacaatcttctcctgtccttcaattctaaacccaccagcaagattgctttcatttgttagggtcctgttttagggcaggcctatattatttgatgtacagatatttgtgttttataaaatgcctattattttgtgccatttctgtcttaattttcagtctccatatttagaggaagctttatctttctgattatttggtcaaattcaatttaataggaatttattgagaatctattgttggatactcccgaacttggtggagccatttgagttgatgatggtcatgacggtgatggtgatgatgatggtgatggtgatggtgattgtgatggtgatggtgatggtgatgattgtggtcatgtggaggatggtggtgatgatggtgatgtggtgatggggaggatgatggtgatgaagatgatgatgatggtgatggtgattgtgatggtgatggtgatgattgtggtcatgcagaggatggtgatgatggtgatggtggtgatggggaggataatggtgatgaagatgatggtgatggtgattatgatggtgatggtgctgattgtggtgatgcggaggatgatggtgatggtgatgaggtggtgatgaggaggatgatggtgatggtgatgatgtgatgatgatggtgatgatgatgatggtgatggtgattgtgatggtgatggtgatgatgtggtgatgaggaggatgatggtgatggtggtgatggggaagatgatggtgatgaagatgatggtgatggtgatgattgtggtgatagggaggatgatggtcatgacggtgattgtggtgatggggaaatgatgatgatgtttatagtgatcatggtgatgatcatgatggtgatgataatgatattaatcatgatcatggtcatgatgatggcaattatcatggtgatggtggtgatggtgatagtggggatagggatggcagtgacaataacagtgacaactgcacctaacactctccagcactgatgggtttcccagcacagttccaagctctttatgtgcattaacttcatttgatcctccatttcctttcccagctgaccccataaccagctagggcaccacatcttccacagttattgtgtttctgtggcctccagccagggagtgcctgagggggtgttaaggtatgggagaccctggacgtgaggtaactcaaaggcagatgcccttacagtagcccacccaggtcttagcacattttctgaaggaaaattaagcagcatttgatccttcatttgatccttttgtagacaaaaaacttgaggcacaggaagttgatcagcgtgactttaccagggttgctcagccagtgagtggcagagctggtatctaaacccaggccacctgggactatagatcacactctcaatcaccatcctgtttgcccttggaaaagtcaccaggttatggagagacaagagacacacacagagagagacagagtgagagagtaattaaataacagttcaaaaaataatccactgaggcacattatttaatttatcattccataaacatccgagtacctactgtgtactaagcctggggataaaatcatagataagcagccatgccttcacagagcttggaagcagaagggagaggctgctctcccagcagcccctggggtgagccgtgctgaggaagaagatgtggctgggaatatctgcaggtcagaggagggatgtcagcagaggctggaaatggtgggcactgcttctcagcatcagtaccattgatccaagtgctgaagaaaggccgagaatccaagagagcccagtggggaggacaaggaggaagcctccaggctcggggcaggggagagtgggaaacccacggggaaggtgaggaaggctgagcgcttgaaggggggccactgagtgactggacagggccgggcaggtggacactgtcaagggggatgctctttctttctccacctctgccgtctggtttctaccatcttcctcattcccagagcccctgggacgcctgcccacactaagtgagggacagcaggggcacagcctgctggattttaaaattagtttccaaatcagtttgaccaagataacattgaatctgaggcctgggtcttcctgcagagctcttagtcctgggtcatcccgtcggaaactgcagtcctgcttcctgaggcagggttccaggccgagcgcggggaggttagggcccagggacaaaatgattccattttgactccgctccttccccagctgaccccataaccagctggggcaccacgtcttccacagcgattgtgtttctgtggcctccaaagggaccctggctgtagggtaactcaaaggcggacggccttacagtcacccaccgtgttctcagcaccttttctgaaggaaaattaagcagcagaaagcagccactttcactattatttattgtttttttaattgcacaagcaacacatgagtgacttctcatcactgaaaactcaaagtgtacagttcaagcgataatcccccactccgcccccgcccaggccccacgttaaattgattctcacctcggagtcaaccggcgttttctgcttcatgtgtttactttcctgtgtggctaaaaatgtctgtaaaagtgtacagatttgttttccgtggcattttaaaaacataaatgatgtcctggtgcagctgtgcagaacttgctgttcacactgaataatgtgccttcgagggccttccgagaagccagcgtgcagagacttagccaagcgcttagcctgccacgacccttctggaaatgttacctgttattattattaattgtagcaagccaaaattgggaaagaggctgaactgggatttgtagactggggaaaactccagatttttaaattggtttccaagatggttaaaccaagataacaccaaatctaagaactaggaaggcgtaggtctcgcagcctccatcagtcaagtgatttgcaacgctggtcctgcttccagaaggtctgggcacagcgggagagaggcacaaggccgattatttctctgttctgttcagctcgtaccaaggaccagctctaggccctttgcagggagagaaagaaaaaaagaaagatcgtgaattctgagtggagtgaccagttccagacacgagtagccgtgttttacacacttggccaatgactcattccccgctgaggggaaacgtagtcatgctgagatctgtggagcccgtggcctttggctttctcaccccagggccctccccctcccgagaccacactagcccgctgctcaccatccccctttctcctctgtctccagtgcgtttatctttcattcatcattcctcgcaaacaccaccagcccaaggtggttctcagccatttggcctccgattccgttctgtctttcccgagaaaagccgacaaaaccttgcacctcataaattttaacagcttttccaactgatgtatttcatgtctgaattgttttatctgtcctactttgattgtaagcctcgagggctgagacctcgtcctgtttcatcttctgtaccgctccgagcgcactgttggcattctgttcgtaaaaacacacgcggagataaatatatgcaaacatcgataattgttttagttggagccgtttgacgacagatcagagctgtgtgtggacccctacatctgaggctggagcgtgatttcaggccacctcttaatctgttccttgggtattagtaatttgtaaaacatgatttatttgcttagaatttttcctcataactttaaatgtgtgcataatagtaaatctctgatctctgattaacttttgccaaataggcttcccagagtgatgaatgcttgtgtggtgactcataaacaagactcaaagcatttgtttaaaaaacacgaggcttccttctgtctaagcatgaagagatgttaaaacgaaaaaggttcaacttagacttaagacagacagaaattaatcaggagtgatttcttcttggtctgaattttaaattgtttgtgaaagggtaatgatcgagctggctttgttttactccacttcactttgtttctaatgtgtaaattttcagatgcttttctgctagaaaattcctcttggtgaatatgatgtgcctatcctcacataattccacaagtggcatgcagaaaaacagggtgagtcccacaagaaccatccaaagctcttgccttcactctgtgtttgctgaacacccactctgtgccaagtaatgtgctggatggcaaggattcatggttgacattgaaagacaaggttcatatgtatatatgtgccatgctggtgtgctgcacccattaactcgtcatttagcattaggtatatctcctaatgttatccctcccctctccccccatatttaactaacctgcacattgtgcacatgtaccctaaaacttaaagtataataataattaaaaaaaaaaaaaagaaagacaaggttcagccccagggagctcccagacattgcgtggacaaacagagaacagataatcaacaggattaacaggagcgatgggaatggtgctccttgagagggggcggccaggaggccagggtcgggaagcagccgtgcccagctgggagagggagtctcaggcagggtgagcacacaggccctgggtggggaaggactcggtgggctccccggacagaggggagttgagcctgtccttgttatttcaggagcaacaggaagcacaggagcttaaacgattgtggttcctctggctgctgtagggagatggacgtggagggatgggtggggggaggaggacagagaagtctccttcaaggagatccccagagacaggaatggatggggatggggccagtggcctagagttggcgacaaaggaggagacacctagaatacaagcctgagctgagtcctctgatgggagatttaaatatacttttgctcgtgatcacagggagctgcgatggcccagtgggtgggggcagccctggcgtttcctgcacctgcagcaggagggtcaggttcaggcgtctactcacacccgaaggagggcactctctcccgatctgcgacagtcagcccagcacccatggctgactctttgacaagagtctttcttctttatagaaaatagaaacacgtgtctgcgtgctgcagtccggaacagtggagctgctgaaatcagcagatcgtccatggctagggaggagagggggctggacagggcctggaaccttccctctgccaggctctgacctcaggcagcctcccagcctggggacttgggtcgggtttgggagcccacgtttggctcagtgggcccgagtcagagacgggactgcagttatcacacccttcaccttcgtgatggtgttgagtccagtcgtctggatttggggatataatttaaatacctgaccttttaaagtgggcactctaaacaacctacagtgagtgcctgccaaagccttgtcttccctaaatctatgggggggggggtccccgggtctccaggctccagctccatgtgatgcttcctgacatgagggcagttggtctccaccgccaatgctgagccatgaacagcatccagatggcaccctcagaggcccagggagatggctactttattccccagtacaagggctagccctactgataagtaccagggctagatccactgataggtaccagggctggatccattgataagtaccagggctggacctactaataagtaccagggctgcacccattgataagtacaagaggcggacccactgataagtaccagggctggatctattgattgacaagtaccggggccaaacctgttgataattaccatatgagacatcaaaacccagacatttgaaaagtagtgattaatttgttttaaactatcagcaataagcctattccatgttaacataagtaatgtattttatgaaaacaaactgtgttttccaaaacaacaccagctgagtgagacattggcattgtgctacatttttgcaaatctcttccgtgtctggtgtcacagaagctggctgggttctctggggtctgcttctgtttccactctgttgtgatgcattgtttgggttgaaatagatgaaaaaaaaatcagcctcactcaggtgtgtagatgggaagggagggtcattttaatctcctcagatgattgtggatgttattcttcgatgttacttcaaaagtcaacaagaggcagtttcctgtttcttaaacgttagttgcagcatgaaagctgaagtcgtgtcattgaacttctgctctgttctgctaaaccctattggtttctgttgttctctgaatggatctttaacccatgcataattttgtagcatcatggattcatcatatgcaattggttttctgaattacgcaggtcttccattatacggcagtttaaaaaaatgacgtttgttaacatcaccaccagcctcatcagaaaagtccttcattattgggaagccattgagcttgccatggcagacacaaactttccaaaattctaagttttgcttgaaagctctgtttgtccttgcagcaaataccgccaactgtttgcctcaaagcaacagactgacgcgttccttttcaattagctatctgcctaacagtcaaacatgactacctgctgcttgtctgtcaatccttcttttaagcaaaaacaggttttccacaaagaagtggctagttgagctagcaactcaaaacagtggttcaggtgctttcccccagccatttactttggtgtgagtttgtctgtacttcccattttgtcacatggagtaataagaaatatatttaagagtcaagaagtcaagacttggtacaattgatttcaccacttctacttcactaagaacattccctagtggaatgatgtttctcccatggccccagcatggtgaggcagagcaagaggaaaactgggcactgctcagggccctgcagtggttccacaggggcgcccgtcatccatgcaaaagtagccaccgtgaaaatggccaatggtatggttttttaaaatcaacttggttgaaatacaattcatatgccttaaaattcagacttggaaagtacaatttatgatgattagtacattcagagttgtgcagccaccaccacaatctaattttagaacattttcaaaataaagtgaaccccacaagagaaaccccatccctattaagcagtcactcccctttccccctccaccctgcttttcctacaggcccgagataacaaccagtatactttctgtctgtggatttgccttttcgggataccctatgtgaatggagtcactcccacgcagtcttctgggccacccagcacactgccgtcatggttcatgtgtccagtgtcattcgtactcactttgtttttattgcagaatcacttcatagtgtggtgaggaaggaaaaataatgaccccccagatgtccacgttgtgatccctggagcctgtgaatatggcatgtgatgtggcaaagggacttcgtgggggtgacgaagtttaggaccttgaaatgatcccgggttacctgggtgggccctaagtgcactcacagggtccttataggaggggggcaggagggtcaggtcagagaagaagtggcagtggaaacagaggtcaaggtgacatggaagacaaggaaatgattctacccagaagcctccagaggggcactttagactctgacctgcagaactgtacggtaatgcttgtgtgtcagtttaaaccttggagactagggtaatttgttacagcagcaaaagtaaactcacacacgctcatgggctacactttgtccgtccttgcctgggctgatgcacacagggtgtcctcccacttcctggctgttagaagtaaagctgctgtgaacactagtgtgcatgcatttgtgtggacatgtgttttcatttctcttggttataccccggaactggaatggtggctgggtcataggataactcacactgttcagcattttcaagaactaccagcctgctttccagcatggctgtgccattttccattcacaccagcaatgcatgagggctgcagttgatccacatcctcaccaacacttgctatattccagtttcatgttttagtttatcccaggggcgtgcagcagtgtcacattgtgatttagtagatttttcagaatgagagtcactcagtttgctgtatatgcttaggacaatttctagagatgttgaatggtggatttttttaagacttttcaccagttatggttgtttctctggggacgaggtctgtggaagtcctcatgcctccattctggaagtctcttgaagcaacatctgaatgttattgtaaagattcttggacatagtagaaccccctggggatgcccgggagtctgggccgtgcctggcatgcagctgtaacattcgttgaggtgcgtgctgctcaccaagggtccccccagcagaacccagcacctcccgggcagggattggggttttgtttgctgaagtctccccagtacacagtcgacattcagaacctggtgaacgcatggatgaaatgctgtgacgcatgaggaaatacagattcagaggtgggagagagggaggagggagggggagctgagctggcggggaagagggtagggggaagggttggggaagggtgtgggaactgacctgagagggggaagggggtcagggcaaagagggagggggaggtgagctggggggaagagggttggggaaagaggggggaaagggggtgggggactgacctgagcaggggaaaggggtcagggtgaagagggaggggggctgagctgagcaggggaagagggtgggggggaagagggaaggggggctgagctgagcagggaagaaggttgggggccacttccagtgctggtgcctgacgcccagagacaggccagacactgttgccctagatgcggagggaggacagtgtgccgctcattgggcagcccccaccgggcccacctgggtctgccctggctcctgtcactgccaagagaggagaacagaactatcacatgtgtgtcccctcaacgtcaacagcagccggggtttccaaaacggcatgctgtgcatggaaggactgtacctgggagggtgagtggggcagctcagtggggctcgagggtccttccaaccctagacacctgctgccgcctttttctaaattgctgaagacgccacagccctgtgactctgcttgtgtgcgtgcttctagcagggagaataaatgtgcgtctttaagaaagggcctagacttccaggttaggcagtgaagacgccgccgtgtctgcagagcgctgggtcccctcggcccccacacagatacctgaggaaatcaagacatcttcgctgacccacagacactgttggctttttcaagacagacaaatagaaggatgacatcaatagctgatattcagggctttactttcattatctcatgaagtcctcagtgtggccatttattagttcttcattcattcattcattcattcgctcactgtttattgagtatcctctttaccccagcgctggccatgcactgagggtgcagtgaccgtgggctccatccgggcaccctggtgctgtcattagctcgtgttgcacagagtggttggtcacatgtcaggtcacgcagcctgtgggcagagaatcaggacctgtgcagcgccccaggacctcccacccttgggtccacctgagcacaaaactgtaggcccttaggcattcctgagtgaacctccctctgctgccaatgtctgggtatgtcctacccagccctgcatgtgtgaggagccaagccctgctgtgacctgtgggcgggaaggacgtgcatctgggcagatggggcctgccctacctgagtgtcaggtcacagcagagacgtggctgctgccctgagcagattccctttgcatggagtgtgcccgtcagggctgccttcctgacagcctaatgagctgcctgtgttgactgcgggatccttccccaccaaacgctgtccgagaagtccatggacggaaggacgggctgtggcaaccctgcgtcgtgtgggaacaccccgtggggccctcccttttgtgtcccctggaacaaacaataagaactgcccaggagttaacgttttctgttacttctttattgtttttttagaaaatgtttttgttgattcttctgtagtcatttagagaacgttagccatggttccgaggcaccacgtgcatgaaagtagcgaggctcgtttcgatactagaggcggcccgtctgtctaagcagcgtggtgtgttgttggtacactgcagagctgggccactggatgaatttgtggactacattttgggagcacgtgggtgggaaagatgaactatcagggaccaggctccagtgctgacctgaggcagccatgagcacagtgggggtgaatgattcccgcacggcttcccataaaaccctgcctcacataacgtttgtccataaagtcaatctccctgggctcagggcaaggaggggccactcgctctcagctgcacattgccccttgggcagctggaatgtgcaagcttgtcatggagcatcctttgggaacacacagcttctccatgacagagacagtgccgggaccaactgtcctcagagcatgaggccaagctggacccagctgagttaaggagtgtccaggcatgggaatggcattcagtgctgggataaagtatttttggtctttacctgtaaagttttctttcctctttcccctaatgacttcccgccccctgaaaatgaaggaatggaagatgtagctattgacaggtgcacgcgcacttctgaaaggcatcttgggtaggagagggtggtgcacaattggtggctgcccagggcatggactggctcacagggccacaggaggggttactattaggattgcatcatctgacctacacacccaactcatcgtgtgcagaaaggaagggtgtcaggagaggccccctgcacactgctgggtgcatggggagggcaatggctcttatgcaggtggaagcagcaagtctctgggccatgagtggtgctcatcctggtccccaatgtctgtaagaaaagaggtggtggaagatcaggggcagtgatcaccctggctgtaatagaaacagtggctaatgtttactgacgggttgtaccacatcttgaacaccagctctggtctgggtttgggatacagctgtgaacacaacagatgaggtcctggaaatgctcagatttcataataataatgatgaataacatcatggatggggctgatcactcctccgtggggctgccctggactcctttccagactccttcccacccaggcatctgcatgtcttcttctgaagctgttttgtgcccttgatcctattagcagcctggtgcagcctgtgacccgcccacctttacataataatgcctcacatgcataaagtgaaacacattgactcacagaagcaaataatcatattggcatgtagttatcaaaacattaaaaacaagtctgtgaggtaggagcatctttattaacgcgattagtaacaagagccttcagtgggcctgataaatgtggtgatttcaaggtggtgccaactataaactaaatgtcagatcatctgcaactgtgctgggagatgagcactcacaggaggctgctgttttcctggcgtggtgcccacattcataacagaaggaaacattaagtaagaggggaataaaagaggtgaatttgttggtcgtccaagttcacagagccctgggttccatcccccgatctacagactgagaacccttggcccagaaggtctgttccctccaccctgcacccacctcttgcctctgtgccccctgcgctccttttccttggcatctttgcaagccccgctcaccttggggtatacaaggattgtgcctgtccccacatcgtcctcaccaccctctgcctggatttgttttctgcctcctggccagcctggctgcaccttccaccttccccagtacagattccccaataccccagctgcccataccttctggcagatccagagagccctgtcctggggcatcagggcgaacagaggggccggttacttcatgcatctgcacaggatggaccgggcgaagcaggcagggctctgctgaggagagggaggggcagagaggcagagcggcccaaacaggacaggcagggcctccttgggtgggtgggaggcaggggcagcttcagcaggggtgcgccttcagcgactctcacaggagaggggcagggtggcccatgaaggagccacatcaacctgaggtcaaaaatgttcatccaaagtggacaaaacaatgaaagagccaaccacaaacaagaccaagcctcagatgcagccgggcgtggagtgagcctcagagggcagggacggaacccaccagagactgaagggcagggtggaccagcagagaactctttcctttttcctattttctccaagtttttgctttaaacacttattcattttgtaattagaatatgttttcctaaaaagcccctttagggctcctgaattgtcagcaggttaaatcccaagccccttcccacctccgtctcagtgaacacatgccaagctcttgtcaatggccagacacgccgggcactgtgggggtgatggtgacccgccggggacttgcctcttgggggcatgctggatgggaagaccccactgccctctgatctgctgaattgctgggatgttttccttctagcaccttccaggaattggctgctgggacctctccaagcccctcccacccaccggcctgcctgcttcccatgcctgcctccaacaccagcccctgccacccctgctccctactgggaccccacccccccggccactgtcacctcaggggctgctccagaggtcatgcaccccccaaaacccccagcccaggacctcagcagagcatgctcctccctccttccgtactatggctcctgctatctgtggcctcagcactcgcctttcagccagagccacaccccctcctgaaacaaaagggacctgagtggccgaaacagggagtgacgacccctgcggtgccggcagtaaggtgtggagatacccctttccagaatcgcgtgtggggaggatgtgcagagggagcccccacctcccacccgaccctgggaccagttttcctgtagaacggggactttgccgtctgtgccttagccacaggccagatctcatcgtgtttctcaccctcttctccacgcgtcccagaggccaggcttgctgacgcacccgagggactggctgcggggcaccccacatggcggggtcctccatggaagtgtggtcggagtacccgaggccccttccctactgcaggcactgcccgccaagcttccctggatggctcctccagggctgacactgcgcagcctgggcgtctctgcggtcagtgagggtcgccttttttatgagcatcttgaggtccgttgggctaacacgagtccctcagtggtcatgggagaagcctcaggttctgtcagtgttgcctctcccttttgaataaatttgacgatgctgacttcttgacaccacgtccctgggaagttcccactctccttttcagggacctccaatccgcccctgcaggttggtggatctcccaccatggtgctgcccctagaggtcgctcttggagagctggcttcgtttccatgtcctgctgatcactcccaccccgccctgccatgccattcaccatctctgcagccaagggctgtgccctctttcacccggctgagcgggcagctgtgccgggtgtcggactggggacctccttctgctgggggactctgcagacaagagggggcacgctggatggatgtgcctgagggacaggcaagtgtcaggtggcagagccaggcctcggccctgccctttctcacccacaatgtgaattcatcagcaccctgagtgtgcactcagcaagggctttccaaaggccgaccctcctgacccccctgaccccactgtggctggaggtgtggggagcagcaaggggatacgtggaagacagacctaagccggccagcctcccaggcggggcagcccccagatcagtgcaggaacatttcagcagcgcaggcaggcggcatttccctccaagacaatagccctgtcccagtgaaagacacagagtggagaagcctctcgcgtggtctctgcgtctgggctccttcatctgccgaggccccgctcctcctcctgacgcggctctgcctctcccacgcactggcgctctggctttcttctttctccctctgccttaatgatgctgcccctttcctgttcctggttgaagctgaagcccgcttcccttcgccgcacacaacacaggagcaatcttctcagccgtgcactcacagcttggaaaataaagggaggaaggagtcccagccacagggtagaggaacggcctctccacagagaagctgctgctgctgagctgaagtgacaggtaccccgtgctaatgatggggaaagtgtgaagggtttattataatttaagagcctctctatttgaacagactgtctgactctccggggatggttttcaaaaccagctggctcctcggatgctgctgagaatgaaatggggaagccgtgagaaagcagcacaggtcccgcgcgagggcgtggcggtgaggccgctgctgcagaaccggaggcctgtgcatctaattttagtgaagaatgttatggagacagagggtgtcggggtcaatgatcacctggattccgggattccttgctttcccagctgtgagcgtgccgtatttcccagggtggggatggcccagtgtcctctctgcagctcatctcctgcgaggcacaggcatgttgtgattgaggacacaggcttcggtgcctggcagggtccttcggggtcctggctctggggccttgagggagtcactctagtggctgagcctgagccatctctgcaacgggagccatagtggtgctcaggtggcgggacagcggtgagaatctaattcagaaatgaatgcccgcaactcaccctgcgcagtgcctcagcccaggaagcactcagccagccactgctgtcttcacaactattgtccctcaggggattcattccaggcccgcccccaggggtattaaaatccgaggatccttaagtcccttgtataagaaggcatagtatatgcaagtaacctacacacatcctttgtatactttaaatcaactctagattacttataatgcctaatataatcaaagtgctatgtaaatagttagactgtgtcttttattattacattgtcacttcatatttttttaaatatttcggtcctcagttggttgaatctgcgggtgcagaacccgcgggtgtggaaagccagctgtatcttaccatgaccctgtggacttgtttccagtcctgcctgctgtctggcgagctcctactcagccttaggcaccttgcctgagtgcccttccctgaaacagcttcccttgtgtgttagtctgttctcgtgttgctataaagacatacctgaggctgagtgatttatacagaaaagaggcttaattgactcatggtcctgctgtacaggcatggcaccggcatctgctcagcttctggagaggcctcagggagcttttactcataatggaaggcaaagcgggagcaggcacctcacatggtgataggggagcacagagggggaaggtgccacatactttaaacaaccggctctcatgagagcttactcactgtggtgaggacagcaccaagccacaagggatccccatgacccaacacctccccccaggccccacctccaacactggggatcacagttcaacgggagatttgggtaggacaaacatctaacctgtgtcccctggcttccctcctctggtgcccagtgccccacacccctcacctgtgccctccctgcagatctccggagtcacctgggcagcctgcggcccaacactgcggtgctcctcgtcagccccggcctaaccctcggccctgctcttcccggggcctgttcagatgcccgcccgctgcccaccatgcaccctctgccctcctgtgtgtgtgcccacctctcccacaatgctgcagagtccaggggagggaaggcagagactgggccctgtctggcctttccctggtctcagttgagttgcacctggcggggcgcatgcagcccattcttcaccacccaggtctgtgcagaggagatggatgcattcccttctatgggcgtttgtttaggccaagctcagtccaccagtcctggtgcccgtggatgcccacaggggctgcacagctccattcctcagcatccagaaagcagtgtcgcgttcagttggaaacagctctgtagaaaagtcagccataaatatgagagacaggagcataccaggagggaggagaatggcaggacaccgtctgccctgacgcatgcccacagtgccgcccagagccaagctgcaggacgccaaggtaggggctggcaaagcgtttgactcccaagaatgcaccttctccgggggtggagctgcgccgtgccctgctgcctggcccatactgggggctgctggcgatgctttctggtgaatgcagcaggtcctcatcatgtgctgggctcggagggtgtccagctgagccctcccaggttaggggatgctgccagcaccctcgctgacaccccaaagcacacattttatcgcaaggttcttgctgcatttcagcgatgggctcactacatcacgcaggcagacacccggtccccagtagggtggaaaatgagaggatgaccttaaacttccagaaggaaacttgctctgaaaatgaccaggtcctcaaaggaaactcacatgtcttaacttccgggactccactgtcatgaacagctggatggacatcttggtgtaacaggccttgcttaggagggaaacgaagcagctgaaaaagaaacaaatcaataataataacagtaaaaatagccataacacagcctacacttctgaattttgcaagcctcattctttggggatgttttggtgagctggaaggaggagcagagggaagctcattccagctctttggggaaaaaccctgaagctgcagcccgttctctgcgtcgctttctgatgctgggtttatacattcactttattaaaaaaaaaaaaaaaaaaaaaaaaaacttgagcacctcctgtctcccaggtgctgtgtgtgccaggccagcaccaacatcatgaaatgatttcggaattgtgcctggcctggtgagcgcacacagaggagctgcttactggggtacacgcccgcagggcatttacttgatgaacgtgttacggtttcgcttctcagtgtggtctccagaccagcgaatggagagccttagagatgcagcacctgaggccccctccctggactcattttcaccagctcctgcgtgatctgcaggcgtcttagagaagctttggattaagcaaccattttgcaccttataccgtgcaaggcactaaggatacacgttgggagcgccatggcccctgccctcagaagctctcagtctagttcaagaggtggctaaacagaagcacagttttttattctctgggcacccctgtgagccgagtccagctcagggcactggggtgtggccagggatgacacggagtccgtgtcacagagttcccactctggttgggagacagatagggaagtcaagtccgtggagagtgtttgcaggaatggtgagtgtcatggagaaaacaaagccaggtgatggggtggagtctccaaggtggggcaaccagggccccacaccactccggatggcccctgcagagacccagctccctagggaagctggctgcagacagatctggacgaggagactctaggaaaacaaatgcaggcaggcagttgggcggctgttttgggagccaggagagggttcctgctggaagggaggcagggccaggctgtggaggccaggtgtgccctaccaggtgtgggaggggagacccaaagcacagggagcagaagggcccatcccgggccctcacctgctaggtcccattgtccccttcactccatgcccaccccgtctgcccagggcaggctctcaagtgtgcaaagtgccaatggagcacagagaagtgagcagcaaagtgcctggggtgccagtggaggcttcctggaagaggtgacatttgagctgggtcaggaagcctgcctaggtgttctccaggtagaataggaaagggctcaatgcctgtgaccttttgagtactaaatgagaaaataggggaaaataggggaatagataatgtgggaaaagcatcagggacatagtaagccctgggagtgttcatatacacatgtgggtatgcagtacacacacatgcatgcacataggcacacacacatgtacatgagcagggacatacgctgatgcacacacacacgtgattgatccttctttaaaacccacagggaactaccgcaatccccgtggccagctccctgccgagcctccccttacccacatcctaacagagagcctgggtgttgtttagatgctgttaactcccagtccaaagtgctgatgccattgtttccttcccgattagcttttgtgtccaaagctaagaatacaatatttttaggccctggaggaagaatcctgagtcagtgactgtctccggagtaacaggcccaaaagcttcagtcgaggccgagatgcaaacttcattatagtatctgccctggcggcagccgcagcgcctgtctttgcacctaatgggcctttttggacagtgacgatgatctccgatgagttattaatactgtgatgcagcttgaataattgcaagaaaagcacaggactccaaatgggaacatacctggcagtggaagaaatgcttccttggcctctcctttcagcatattcccaggcgagaggccagccgagatgagatttgcttttagggtattttcagcatttcaagtcttgtagaaatcatctccccacctcgtgggtaagaagggagggaagggaagtgaggggtgccctggcttgggaggtgtctcggtgtttgatgtttgttcttactgacgcactccttcctgcacacatttgagagcacacgtgcacatgcatccctctaacacacagacacgtgtagatttgtttttcctgtcatttcttggacaagtcatttgataaatgggccgttcttccatccagcagcttgcactaatggtctaattagaagctcctggtgaatgttgctatgggcgtcacttcaggagaaatggaaataggccagggaccctggtataatttgaggaaatggctacaggaagagagaggcctggcctggaaggacaggttcctgctgtcaccatcaccacctccctgaataggggctgcgtccaggcttgctggggtctgggtgaaatggttccattatttcaagctggaagttttggtgcagacagtgtggaaggctggcctctcgtggtgcctgttttcaagtctccatcaaatgcaattccacgcacttgggaagacgtcacccttaagattaggcaatgagtgtgagttactgtgattggaagtaatgacccctgcctgccactgggcacaggtaggcagcgaggtatctgccactgaggaaatgtggctttggatgaatgccctcggggtgcaggggtgacgaaggcccctctgtgaagcaaggcccagggccctgctgcctgtggggtgggtccttggtggggcccactctgcctctctctctctgtgtgtctctctctgtctccctatttgtctttctctccctctctgtatctctgtctctctgtctctacctctctttgtctgtttctctatgtatatctgtctccctctctctctttctctgtctctgtctctctatttgtctctccctgtctctctccccccatgtctctccctttctgtctctccctttctgtctctctccttctgtctctgtctccctgtttctccctctctctgtctctgcctccctgtctctccctctgtctctgtttctgtctctctctctgtctccctgtctctccctctctctgtctctatctctgtctttttctggcttgttctcattcactcttttcctgcctctccaaccctgcttttcctctgtaactcctttccatgaaacagtaagcagattgccgtgagaagctgtgacctgtggtgcagaattcaggttttgcacatgagtgaaggtccttgcaacatctagaatctggatccttgtacagagagggcaaaattttgttcccagtagcggtcaaggctgtggaggaaaaaaaaaaaaaaaaaaacaggaaaccaggtagagagtgataagctggtaagtcaaggacctcagcatgatttgcccctgggatgaggaggccctgggtggatggactctggagccaaacctctgggcaatgctgggcaatggcatcccgctgactctgaggacacatgggcccagggtgccttggagccagggctgcccgtgcaggtgatgggcatggcagagtcctgaggccgggctgaacggcaaagagtggtagccagggtttgcagggcacctccccctgtggctcaatgtccacgcagcagatgtggatagaaggtggccaagcagacagagaatggcagagagacggccattccgataagcaccacctctgtgccgggctcacttccaagtgctctgcgtgctgccattccttccacagcatgggggagagctgctgtgatcacccatcctacagacgagggcactgaggcacagagaggctgaatgacttccccagagtcacacagcaggtcaagtgggggagctgggatttgaacccagacccaggctgactccagagctcacctctgtcgcaaagcctgacagtctctcagctaaaatagggcccacaagtgccctgtcctgtgaacacagaggtccctctccctctcccagttcctctgcatatctgaatgattgctgttggcaaaggggccagacccccaggaagtgggcagatttgctgcctcctggtgtggcctcagtggcctgtcctgggaagtgcaccccgccgctcctcagttgtgtagattggaggcctccttggctgccatggcttgtgtcgtgcacacacctgctcagggccagtgacattttggggtctaaatgttgtaagtggaaacaaagcaaatttctaatttgcctgaggttaaatgactctgtgtggccttgcctgaaggtccctggtgggatggatagtgcgggacactgtcccctccagaccagctccaggctaccgccgggatgtcctggtgagcccagggtggccagaaatgatttctccgactggcctgcaggaaactgagtcaaaggtctgctgagtagcttgggacagggctgaggagggatagagctgctggccggtctgtggtgggtgacagtgatgtgtccatatcctgctctgttgacctttacaaccttgtggtaacaccatcaccgttctaacctgcctttgccacacagacctgaaacccaggcaccaacctgaatatacaagttggatgaaaaaacaaacacacccctcaatgtaggaccagacagatttttaatctgcgcacatataaaggtggatttttccctagccccagggtgcactaactgagatgttttccttgctaatatttgtttgcttttttcctttcataaaagcactaggtaataccatgaccttctgaaatgcaaatagattttctttttaattcagaaagcctttttattccacttaagatgagaaggtcctgtttggaaaatacacttgatgtctcatacccattatttatgattttctcctaaattatttttcttatagacttaaaaaaatggaaagcccaacacattagtgcagaaagagggaacatgaggctgaaatggttggcagctgcaaaacaggcaacgatgtaataagattagaaaaaaaagcatctctttttaaggagtttttccgacacctacgtggactcgcaatagcatcttagaggtcccaggtgaagaggaatcagcatcatcaagccagggccaaagacccacaacctgccagggccagtgttgtctttacctgggccaggctgccctcagagactggtttagctcctgcccaagttgttgctggatgatgcaaaggttgccttgggaaggtttctgcaggaataggaagcggctgtccttagtagccaaagacagaagggaggctggtttgatgcttttgttgtatggacagtttggaacctgagcctgccaggctttgcccgtgtctcacagtgcagagtctccctaccctctcaaccccaacacttgggtctacacctgaggcttcctcctctcctttccctcatccacattcctagaaccctgcccttgttagatttcacactccaccagtttacaactgagcctttcccctctctgcatctcccccttccatcattctcccctcgcccccagaccccagggtgtctcctgtgtttctgagaagatcctgggctgcaggacaaggtaaagccacacccgctgcggagttctagcctagatgtgtctgcttgtcataacgcttgattaaccagtccaaccagcatgcataatttggctgagagcaaatttatttctaagccacgcaggttggcagggaaatatcttgatgttatctagaaagtgttaataaatttaccaaatgggtccagtcaaagagaagttgcagctatcattctgagaacaaagagaagagtctatgaagagacagcccacaaagcatccctgtccaagtggaactgctacgaccccagcacgtgtccagcagcacctggccctgcagcctagagtcgtcaggaccctggacagttctccaggtctcatgcgtggtgatggacgattctgccccactgggcgttaaggactgcacttgttcttcctacttgatcctctcaattttgctttatggcatgggagtgctcaacgcagccaagaacgtggtccaccacagctcgcactgctcccctggttttgttcagaaagttctgcatgttggacgctgtgctctcctggtcactggcccaccacctgcacttcctcattgctctgtggttggtggtggtggtcagcaggctgcaggcgtcactgccacgggtatctggaggtatttgccaatgaagctgtcatgtgatcagccaaacgcggggtggtgagcacgacctcctagatcacagcagatgtccaccttccgtatgcagagccatgctggcagctggggccttggccaacgctgctgcatttgctctgtggcacctgcatcaagactgccctgtcgaggctaggctgttgcagcctcacgtctccgggagggctgttggggaagcacaagaccctgagctcagtgcccagctcctccatcttttcctgaatcacaagccagttttccttctcaggttttgcggctacagggaccccctcaagcatcatgtgtttagggtatacgaatgtggcataacattagtgcaatcaagccattataggaaggacatctcagtatgtctctctgaatcatcgttgtaaaaccaaacacatggacgtgttcccgttgcttgtgatggaatcactggtgcgtgctgatgtgatggccagaaaatgaccacagagaagacttcatctttcctgttgcagaatcccctccagtgtgtgctccaccgggcagcctttgcttggtgcttttcctgtgattttgcgacaagcactggcctcgtgcaatgcagcggcctctgtccagggctgcctagatctgcagaaggttgttttttttctttccagtgtgtgtgtgtttgtttatagagtactttcggcagctccttcccaagttgaaacaaattccaaaagaagtgcatggggtggccctcccctgagggagggacctcttggagagaaggtggagacccagcacacgacacgcagcaagttccacagggaaattccaggagatgtcacgtgctcctcattctctgtcggctgagcctgaaccaggcagcaggtggccacgcttggtcacctcgtgtcttccctaatccagtgggtgtgcatggcctgtctttgcagcagctctgcacatgtgcgtctcagcatgcacttgattgccatttgaatgagcttgtctgcgaattctccactcacatcctttgccatttaaaatttgtttttcctgtgtttttcttctatttttttctttcccattaatatgtcagttgtacatattttggggatatgtgatgttttgttacatgtatacagtgtgctgtgatcaaaccaggatcatcggggtacccatcacctcaaacacttatcttttcttagctttgggaacatcataattccttctggcaattttgaaacatacaaaaaatgatggttaactatagtaaccctactgtactatcaaacactagaacttattatttttgtctcacttgatgtttgtacccatgaaccgacctctctttattcctctcaaccccccagacacactccactttcccaggatctgacattcaccattctaccctctacctccatgaggtccatcattttagctcccacctgggactgagaacgtgtggtgtttgtctttcagtgattggcttattttacatgaaatgacctccggttccatccatgttgctgcaaatgacagaatttcattcttttttatggctgaatactattccactgtgtacatgaactacattgtctttatctatttgtccattgatggacaccaaagttgattccatctcttagctattacaaatgcagctgcaaaaaaacttgggagcgtagctatctcttcgagacacctgctttccttcctttaggatgagtgcccagcagtggggttgctgggtcatagagcagttccattcgtagactctgaggagcctccgtgctgttctggaggcggtggtcctacctcatgttccctgcagcagcatatgagggctcccctttccctgcctccttgccggcaggattttttctgttgggtgaggtcatatttccccaagtgttcttgatgcctgtggacatgtgatagtgtccgtgttgagggattaggtgtctattttagtctttgcagtcaggtttgcttgtgcctgtccttcagatacgaatccatttcctgagcctgtgacccctgcagccatctcagcactagaggatactgtaagtccaggctggccacaaggctatcaagggctccagagtggacctgcagaagacccagtaagggtgctggagctgtgtggaaatgctggccagggctcagaatccagaagaccgtctggtggcccagacggccatgcctcccagcaggtctctgcacaggcacaatggatccctgcctaaagcaagaggggctgcagctgagactgggccccctcaggctcttcggtggggtggaggctggagagcctggtctcattggctcagagggtgcacgtctcccagcaggttgggatagtccccaactgcagtgagtggggccggagctttcagccccagccccagccccagcccctttccttcctctccctggggatcagagggtggggcaaaaagttcccataatctctaggtctttctggtgaccagtcccatctgagaatatacaggggtccaccctaagtcacctcattagcataaactcataagcatagagacgctcctaacacttgtgaaatcccagggctctgggagctgagccgggaacctgggcaaagaccaagtcaatccctgaggatctgccatgggatgaggttggtgatcccagattgctgagcctgacagggaggctcagactcccagcctgcgggatgtgggcaaggctccctctggcttcctgtgtgagcacctctttgctgggacctcagctgagtggggctggagctgcacctctgggccacatttgggttcactgccaagactcatgtcagaggtcacaagagcttttctgccaacccactagcatgagcgattcctcctggacttggcaaatgtcttggttgcacgctcaggccaaacgaggctgtagccaagccgcttgggggacagggctgtttccaggcttgaaccgggaagcaagctcagtggggtggatcagccacctgggtgtggatctgagctctcaaaaatgactctcccacgtcttgggctccaccagggcttcacgaactcctgcctgaatctggaggctcctgcagagagacttgtgactgtggatgggcgaaaacttcttgttgtgtggggggatacgggcgagtcaccttctgtgtcaccatcctggtgacatcttcagctcatgcatttttcttgtggttttgcaaaggtttcttggatattacgcacattgttgattttgccagatagcaagtctccaatctagtacaattatggaatttaaaaattttttttgagtcataaaaatgtgcatattttcaagtacttgcaataatttaatatactcgtataatttgtaaagatgaaatcagtgtaattgggatatcccatcaccttaaatatttatcatttctttatgctggaaacattcacattattctcttttagctacttcaaaatatacaatacatcattataacctgtagttaactactgacctgtcaaacactaggtcttatttcttctgtcaaactgtatatttgtaaccaataatcaacctctcttcctggtacttttgtctatttttgaggcctgacgtattttgggtggacttgcctttttctcataataggatgctgtgggcattcctccttatcagcagctgtgcctctcatcccatgttaatgagggtgccatatgcatgctgtggttggactcacacttacccaaccaaggacagctgtccacatggtcacttttccatcaaacctgactttgccgtgggatttgttaagaccatccttcctgctgaggcccagagtggggatgtaaccatggccaattatggactttcccgaatgaaaagcccttcattccgatgttacagcttagactcgagggtctaatttaaggactctctacctagctgctgagttgaaaacagcctcctagtttctgctaatgtgacggttttgcatgctgcatttaggcctgtcacccacagggcttggctttggcatttggtgtgaggtagggattgcacacctctgcattctcctcattggtctctttggtctttggccgtttctctgcctaatgtctactacagggaactcagctcctcaggagcattcttccatcatctctgtgttgtgtacaaagcagaaaacgaccatgaacagccagccacacctccaggagggccgataaaggtgtgaattagaggtccctgcttgcccagggagacaagcttgcagtgtgaggcttctcctgcccctgccgagagcggtgtttgcctcgtctcttcatcttttctcacctccacaagtttcctcggaaaaaacaggggcttttcttcttctcctgccccctcttggtttcacactctctgtccccttgacagcccctagtctttacccaagtgcttcagaaaacaaacacactttaaagtcgtttaaagaccagagagacacagctgctgccttccaggcagagtgagctgggaggcttcattctgagtttctgaagtagctcatctccaagtggtgcagaagttcttgccagatctggcccagggccgtgtgcgtaggtcagtcagtggaggaaccccaagtgccaggtaacaatcttctcacctcctaatatcgccctagacacatgcttgtctctgtgtggagtatgcttttcttctatcacctccacagtggtgttagtcatttataaactgtccatctgtgtgcagaatctaggatgtggttccaaaaacaaaatctggaaaaaaggcttcaaaagaaaaaaaaaaaaaaaagatctagtgaactggatacctaaaccactagggaaataattaatttcaagaaggtaaaagaagcagagggatgatgtggggaagtcattggctgtgttccccttcactgctttctacttgagcccttgaatttgattcttgagctgggcatgcagtccacagctctttgtggagccatcgactctacagacttcttgctctttggagcttgtttccaacatcctgaagctcaaattggtgggagggggggctttggggaggagctcgtttgtttccccacagtggttgctggcgcttgatttttccaaatgcagcttaaatgtttgtatgtcttgggttccttgtgattgacaaacgtgactaagtctctggtgcagatgttcgtcctgcagaggcaggtgggtgtatgagaggagaggtggcagggacggacgtgtggtggaatgagaaattgacttagtctttgtccaggttcctggctcggctcccagagcctgggatttagcaagtgttacgagtgtctctatgcttatgagtttatgctaatgaagtgacttagggtggacccctgtatattctcagacagggctggtcaccagaaagacctagagattatgggaactttttgccccaccctctgaccccaggaagagaaaagaaaggggctggggctggaagctgaaccctgtgaaaacccctgaacaggaagatacagagctttcaggctgttgagcaggagggcgggcacctggagggcagggaagctcctgcgcctcccacacctttgccctctccatttgtctgtccagtaaacttaagcaaattgtgttctgggagccattctagcaacagactgagcctgaggagggtgtcctgggaaccgtcagtcagaagcacaggtggccggtgcgtgggactggcctgcagtgggggttgtgtagtgggacccagcccttatctgtggagtctgcgctgacgtgggcaattagtgtcagaattgaattgaattctggacacctagtttgggtgttggagaattggagaattggttggtgtcagagaaaacaccccagagaatgtaagaaaaaagcaagggaaaaagaaaagcctcttgtttttgtaggtggccagagctaaacccatttctcaaaattcagtgagggggtgactcactaatgggggcccgctcttcaggctccctgaggatggggatgagggtcacctgctcagacccaggggatggggcagtgggacagcctcccagcacccactttctcccagcactgactcccagcccagcctcccagcactgcgagagctgcttcagccctgctgtccaggtttcatgtgaaaacagtgaatcccacccaccccagaacaccagaaaccaggtggaccctgacttccagtggaagaggcctctgctgggaggccactcttctggccaagttagagttctctgcattggaaatgtgttcatacattttgctttttttgttgttgtttttgtttttttggttttttttttgagacagagtctcactctgtcacccagtctggagtgcagtgcataatctcagctcactgcagcctccacatcctgggttcaagcgattctcctgtctcagcctcccgagtatctgggattataggtgtgcaccaccacgcccagctaatttttgtatttttagcagagatgtggtttcacgatgttggccagactggtcttgaactcctgacctctggtgatccacccacctcggcctcccaaagtgctgggatgacaggcatgagcccccgtgcctggcctattttgcattttttaagtgaggaatgtcccataatgaaaacatagataatcactgaagcatcagagtgcccacgtgcagcttatttgccaactttcaagtttccagcattaatattttgtaaagaaaaataaattaatggatattggggagttggaaacttcctgcctgtgactctgatgattcaggatttgacatttcctttagtctctgcagtgtcttcaaggaaaagcatatatctaggcccagctagttctgtggttcccaagagacattgtcattatcaatgtagggatgcgagggttaggagaattaatgatttctatgaaatcagcatgtataaaagtgagggtaactgaatcttgcacttccggattttgggtgatggtgaggacaaagggagctgggaatagaacagaatatcaggttgtggaagtttctctgccattatcatcattttggtcaaatgccttcggtggggtcagcctcgctgctggctggattttcagccctgtctcctgtctgagaggccaagagagcagagcgggcccccgtgaaggccacgcgatggccacgggatgagggacgtggctgctgagccgcctcgtggccacgggccccctgcgtcgtcctgcccttgggaactcagagtgagccctccgcacagagagcagtgggtgagatcacaaagctcaatcagaagctcaggggcacaggcagggagactgcagagctggtgaacttcctccctgacactgcaccagcactgccgtctctgaccagaaaggccgtgacaggggaggtcccatttgcaggttcaggccctggggatgctgcctcgctgccttccctcggggaatcagccagcctctgtgtggggcgggtggaggtgcccatcagggttctcatatctgaagcccttcctgcagcaccttgggggacgtcagtctctggaggactctggagacccactcctgcattgcccacagaggaggacagtccatagcgccttctttccaccacaggaaacagcagcccaccctgtgggagttggggaaggcccttttttcctccacagtaagagaggatgccaggcaggttagtggggtaaataatagaactctctcctgctccagggagggtcagagcttactggtagcatctgagcattgatgaagagggcagggctggaccttacttagggcaaagcatagctcagcctccctggaagttttctttcagcaaagcttgctgtcatcatggccaccacaatgggctctctccattcttgctcttcctggaccccaaaaatggtcatagccaggtgggtccttgcgtttctctccaaatgttcttgatttcagggctgaccttcccactctgcagggacgcaggccagaaaacgcaccactgccctggccttggcccagcacgtagacctggtcagggtccccgctgcacatccaggggttcttcctgggtcctggggcagtgggtccatggggggctgctgggtggaggggggtgactggaccgggtgctgtgcgaaggtgtctcagtggaaaacagaggaacaaatagctcctgaaatgtgcctctgagcctgcccctgtcactatgggacagaagaacacccacaagtgacttggaagaactggcacttggtccatttctcaagagtcatcctgcagaggctcatcggccttggctcccaccgcacccaccaccgccctctgtgctgctgcctgctttgttctttcagaacatgcagcctgtctgaacccatacttcccacgctgtgtcgtgtctgcctgtctttcctcttagaagctaagccccaggagggcagggactccactctatccgcagatgtgtccccagcacctggggcctggtgtggggcagtgctcagtgagcagttaaggcatgaattgtcaactgaagactcccgaggtccctgcgtttggagaggagagctctatttctcacaaagcattgtagctgcagacagccatcccacaggctggggagtgaagcccccattgcaggctgagaacgtccccccattccccgttttcaagaagtcataggaggagcataaatacttgcaaaaggagaaaatgcacaggcacagctgagcttcgtgccccttcgtgggtcacaggttcgaaatctgggggcgacagcgtggtctgagggtgaagttttcagcctctgacgtgaaaaggtgaagcagggggcatgaacgccctgagcacaatcctccaagaatcagctggaaccggtccagggagagtgctcagggtttagagagggatacctgtgaaacaggtgcactgtcaccccaaaactgcaaagagggaggagaggcctgatagggtttggctgtctccccacccaaatttcatcttgaattgtagctcccataattcccacatgttgaggagggacccggtgggaggtaattgaatcatggaggcggtttctcccatgctgttctcatggtagtgagtgaatgtcatgagatctgatggttttggaaggggtttccccttttgcttggctctcattctcttgcctgccgccatgtaagatgtgcctttcaccttctgccacgattgcgaggcctccccagccatgtggaactgtgagtccattaaacctctttttctttataaattacccagtctcgggcaggcctttatcagcagccgtgagaacagactaatacagggccggtgctggcctcggctgggtggctgaaggcaacaaaggcatgggtggcccggttcttgttttccggagccagtttccgctgcctcctcaggaaagcatcctgggtaaatgttcgtgagaaaggggttcactgaggggagtctggcctcccatcccatcctggctgggagcgttgtttttcaggtttctctggggtccccttggctgagatggggtccgttcagctggctgaggggattttatttttatttctctgaatgaatcaacaaaggacaagcaaaagaagcaagtgggcctcatgagactggtttgatggtggcacagagatgcccgggggcaggagcgggcccttccaccttggtgttgctgcctgggaatgggaccccggcctgtgtgctcagcccttggaacccaggatccagtcccccaaatcaatgactggaggtgcatccagcacccggcatggtcctggttatggagcaattcagcggtgctgggcagatggatctcagagttcgctgtatcacgggtactctgagattcagagcatccctgtggaggcccctattgtttcggttaactgagaattcactcgtgtgagcaatgcagatgtgttgctctttattgcctgaggactgaggtttctatggcaagtggtgaattcagagaggggtagagaccaggggccaacggggtgactttccagccttctgttctttctgtggctctgaaattggagccaagaagagcgtgcaggctggcttacaacgctgcacccagggcccgggatgtgcctcccacagatacctcaacaataggagatctgaagttggcagcagagaccccagttcactgccctcttcctttccagagcagcaagtcttggcgtggcccctgcccagtgatagtgaataaagaaacaggcctggcccagctgcagttgcacacctagccctgctatgtgcttggcaggtctcagacattgccaccctgcagatacaggtgatgctttgctattgaggagcagattggggcatgtctgctgggttcggtcaccctgactggacacttgctggatgaaactagccccagccccagccccagctgccattccctcccgcctctcttccacctccgcgtgccccccactccttcacctctgtgcttcctgctatgtgatgtggtctcctggagttagaaggaggataactatcaatcaaatgatttctggaacttgtgggaagccccagtatctattttttaaaacgcaaataattttttttcattccctaaactatacctaaaagcaaaatgatgattagaactctctgagtttggcacagagtgagagcttcagtagatgtgaaccatccactgctggccccgggccacccctcacaccgaagaagagtgagctttgtttccaggacagagcgatgtctgctcaagtctggttcaggctgtgtgaggctctcctggtctccattctcagagagcacagggtccagcattcaatttggggtggtgactatgtcaagccgttgtgatctgtatcctcacgtgagcgctgttggacggggctgagttttccacacaaagaggttgccgatgcccgggtgggagggcactcaggaacctacacaacagggaagaggggctggcactcacttgtcagagtttgcagcaagaggggaagttgccgtagggcctctgatgatggcagcgctggggcctgacggccgagcatcagcgccaggcacatccgagccaagcacagctgcaccagggcctccatgacgcttgttctgcttctgttgggacatcggcagaagggagaactacagctggtaatgggcccagcattcagggggagccaggcagggatcacagctgcttgcaaggcctgtcctccctggcttcctgagtcagctcagagatgaaaggcccagaggggtcaggaaagaaagggtgcactgggtaccacttggaaagatggtttggatggatggatggatggatgggtgggtgggtggatggatggatggatggacagacaggcaggctggtaggcagacagacagacatagatgggtagatagatgatggatgggtgggtagatggttgatggatggatgatagatggtaggtagataggtaggtagatggatggatggatagatggatggatagatagatgatgatgatggatgatagatacatgatagatacctagataatggatggatagatagatggatgatggatggatagataatagatgcttgatggatggatgattgatagatgatggatggatagatagatggatgatggatggatgatagatgatagattcgtacatacatacatacatacatgatagataggcagagatacatggagaaataaagaggtggatagagagacaaatcttgctatagcaggaaaaatagtggtgaaaattgctacttaccaacatgctccataatttattaacaaagatatttaaattattttaattttagttcatttaattgaaaccaacatctttccctttaggctcctgggagagcaatgtttgtttctttgtgtttgtttgtttacttgtttgcagaggctggtctcatatgttgtaatacgaatcaggtagaaaatggacacattctccctggccatgccatcccggttatcaaacaggaatgtcaagcccattttcccagcgcctccaccaccctggtgagtgcccccagactgctgagaggcgcttcttccacgcgggaaggttcagctttcctgggtctctggttcatcccaagtcaggctgtttgctctcgatcatgtctgcaggtttgtggagatttatctgtgtccaaataagcgttggcatctgtttctgttttccaaccacactgttaatatttgttctagtgaaacatatcttaagatggcgccgtcagtatttctttagtcaaaggtgagcattgtgaactgagatttctgtagaaagctgaccatcaggcggagtgtgcatgtaagaaagtctccaatggaccgcggttccggtcagggccggctgctagtgttggctatttgcttctgtactgccctgcttcctagaacgcgctgtcaagatctgtttgacattctgtaactctttctccaacaacagcctgtctcctctgctgacagcgaacatgcctcggatgaaagttcattagtctattgaaacatttcagttaattgcaaagcgagaacccagaattgtcaagttcatatttccatctgtgcatgagcatggtaataaagaattttttggataggttaatttgcctaaaataccatgcagtcaatcagagtaacaaagttgttgctgcctgcctctgtcaggcagggctttcatcaccgtccttctccgggagaacatcgctggctcgtacgaattggcagaaatacagcacacacgagcatcagctgcagagggaaatattattccagagcaaagcacccaacagctgggcattgcactagcaaggctagtttatagttcaaggtcttttttgtaagtaaaagatagccactgagacataagatggctttaatatttaattcagattgttgatactatttacatttgttaattttatattttacttaatttgccacagatgaaaacgctctttggaatgaagtgtgtgtgcttctctctgaagatccctaatatacataggtgtttaatttaaaaataaaaacagatgaagtgcataaactataattattaaaataggctcctgtcaaagctctgtgttcccatccatgtaggaagcatgctctgcaggtcccagcagccggttgttaatctgtgccgatcgcctcacagttgcgtcttgccctatcacggcaggcctcctattaggatcaatactcaagggttggctgctcactgaatgccagggatatcatccagcagcagtacatgccacaaaaggagaagctgggtctcgatgctccacgtctgtaactgcgaaacgcagactgctcctgttggctgcatttaaggtgccaccgcctcctccccacccatgtgtttatggagtaatgtgcttatggaaaggacctaggtggccgctgagttttatgcacgggggccacctccttccctcagaaaggggagaggcccctgctatgtactccctggggcaggtagtttgctgagagttaagaggtgtcagtctgtcaggcataccccgggtgcaagaagtgagacatttcttggatggctggtgtttgagaagctgatgtcaggacatgatggagcttggctgcagcatccgaggaccagacacttgtggcccatgccaaagagtctgacagggagacagagggtcctaaagctgccccagcacagtagcctcctgctgcacatggcccaggcccttgctacggaagactcacctaaaactctgcaaacagaaaacgtcagtgacagggacagcatgccactggagtggggtttcctgacctcagcacttgggattggataactctctgtaggggctgccctgtgcattgtggggtacttacctgcatccgtggtctctgcccagtagatgccagtagcacccaccctgcccagttgtgacagccaagaccatctccaaacgttgccccatcccctggggacagaattgcccccagctgagaatccctgcatttgagttagaggggacctgaatcaggggaggtggctgcggagtttaagagcctcgcagtcatgggtgctcactgagggcccaggaggcctggagccctcactcggaagctgcttgggacagtgggataggcctgttaccaacatggaccacaaccagtcatttaagacagtcagggaaacaaacggggaggtgccttagaggcaaagcttcatttaaaataatgacataagacgtgtgggttggagatggatgcagagaagtggagtttccagatgaggatgtggaggtgggagtagaagggcctgggttcaaatctcgaccctgcctatgccagccgctggctcaccccacctgccacgctgcaccccactcaccacactgcggcgcctgctttttccttgagcatctgggacgtctgtcatcagcagacagctgctggtttccgtggctgccttcctaggggagcatggtgacagcttcctgtctgttacctttccccaccccatcacaaagccccctttaaactcccgtttagaacagtgattgaaggtgctaatttcacattgtcttctttatatagattacaccttccaaagccttcagaaataccattacaatgaaaacaatttcaagagcaaattgaatacctaaaaaagtataattaatcaaaccatatcaagagagcccgcagggtcatcaagagctagacccagcggccgtgttgtctttcctctacatgagcatcattcgtgcaaagtgcatcacagctgattctgagggaggttctgacgtcaccacgcagccctggggaccagccatccccaggagaaggctggttttagtgcatcactgagcgcaaagtatttttgcaatcagaaaataaaaggtacccagaatctgagcaggaaagacacggttcctagagcgaggaacaccccagaatctgagcaggaaggacacggttcctagagcgaggaacaccccagaatctgagcaggaaggacacggttcctagagcgaggaacaccccagaatctgaggaggaaagacacggttcctagagcgaggaacaccccagaatctgagcaggaaagacacggttcctagagcgaggaacagtgcatccaccatcagatgctggtgtgcaaatctggttccaacgttttctcgctccctgtcttttggcaagtatcctgttctctctggagctgcatttcctcatctgtgaagtgaagtgagcacggttcacagctcagaaggctgctagaagggtaaaactccatgacccaagcatccggtcagtgttccccaaagccgtcgtgctaggccatgctcacctggggacctcacctcaggaatcgggaagatactagcagtcgctaagtggcttactgagagaggtctaaataagtcccacaatttactgttctttcccacaagtcatcctgaaagccatagcaatgactgttggacccaaggtatccaatgaccaagtcccagcatcgggcagacatggagtcagggcttgttggtcactgaatccctctctggaatcacagatgcaccccaggagagaggcttagctcacagcaaggaacctggctttctcccttccccagctccccctgatccagacaggagtgaggatgtctgaagggttgtgtccaccaaatggcctccaaggccaggcagccaggagaccaagcctcagtggccaaacctgggatctctggaatcgagatcctcagcttgatgacagggacaaagagaggaaaagacaaagtcaacttcgagggcaaaaagacttcagaagaactggaccaggggcccagggaaagcagtggtgaattctctgttgaggagaaaacagagccaggtttacaaagagctgcagggcatgtttgcagaaggaagaagagtcggggcattctgagctctagggagccgacgctggcatgggggatagtacagacccgctcggagagcccctcaccgcctgccaggcgccccttgatcccagaaacaccatctgcagaacctgcagcataggaggccaggaaacagatagagcagttgactggggccacagaataactggcaggtgagctgaacccagttaattataatcgcagacacattgtaaggcccagaacccaagttgagcaagaggggcttttgtttccgagtcatggggctagggagattcctgggcctctcgtgttgccctttgaggctgaagtgtctaataggacgtgtaagaatccccacaaaactcaccagggcgggacgagagggaagcacctctcccgagctgtgcatggactatctgtgaggtctccagaggcacccggacccaggcgtgatcctagtctgctcactcgaccgcagggagggagaggcattttgaccaagtttgtttctctgtggatttaattagtatattcattcaacattcaaatatttaaggagtttttttttctttctccatgacatcagaaatctctgacatttgctgaaccagcttggcatctttattatggatttggatgtgaggcgtccacagttttgagcagtctgcgtgatagtttgttccaaagagcgcatgtgggagtcggaagcatgacaaacacagggctatattagggtcaggaataacgatcatctgcttatcatgagaacaaatatcagcagatcaatgaaaacaaatctcaaagcagcgaaaacaacatgattttcaagaggaaaaaacagggtttttaaattttgtttttcaggattgcttttagacttggttgtatgagcagacaccgttcagatgcttgcagcctccacacttcacaaaattaatgtcgtaacagacccaagagttaccatcatgggttcatcttctgagccccgtgttcaccttcagcacagggcagttataccacatcatctgtacttaccagataaggatgccaaggctcaaggagactgtgacctaccagggtctatagctgagctatcacttggcccgagttttccattcgcacatcatgtaaccttgacttctcgtcccacctcgtagggttgctgtgaggatccaacaggacctgaccagctaggaagtgctgcacccacgttagcgcccctgctgagtgctgggctggcatgggccattcactgcacagcaaggcacacttagcccctgcaatatttgagcacttaccgtgtgtctggccgagtcctgggttcaggggttgtagcagggaacagaagagaccgagaccctgcccttgggaaggggacattctagaggtggcagtgggagagttgttaaccagaattgaactgtcgactgggtcagggaacggcggagcaggccaaggggtgggggtcagttttaaatgggacgtcagagcagagggaatcagctggaggcgacctctgcaccctccaaagacgacctggagctgcagaggccagtttcactggtctcattgcactgtcacctgcgttttctgtctggccttgatgtgggggcattactttgggctcatgagccaagaatgtgtgtgtgtgtgcacgtgacttgcagaagcagaaggagaagcacccgtgttcccgaagtcagtgcgttgtggggggtgggggtggcacagaaggggttggagaggatggacgggttcactgcctaacagggacagggcagaagctcctctgtgagctggctggcgcccggccttgccagtccattctgctgggtcaggcctttttccacgcccgggcttagctaacgtgggcagcaggtctgcttctgcacccagcagcaggtggtcctggagccggagacagcttggttgctcgtgttgagtgaacaggaaggaatgtgtaacttgtcacctccacctatagattttagaatgataggaaggcagccattgtaactcagagcctcctgaattttttaaattgcgctcgaagggtcagaagcactgaattcaggccagagaatgagcaactctagaaaacatgtttgttttctgcccttgcctcctggttctttgagagccactgaaaatcagggcttcagaatcctcttccgaatcctgtaggagggcggaccctaccctggctcacacggtggcaagaggagcctcagctccaatcactgaaccagacaagctttaggggaaaagagtcagaagaagcgtgttttggaggagggtgggtgggtgctgagaaaggcctatcagctcagcggcttctgggggcagcaggagaggggcacacgcatgataaattctgtctagacacaggttggaggacccgttccaggggtgtgtcctctggggatcaggccagtggttcaaggtgagcaaaccagggaaccgtctgctggaaacctgactgtgccagagttccacccagaacttcccagggtgttggtggcacttaggtgccagcctgcctgccggcttcaggcccgtgggacagcagggaacactcaggtctcccccttggcacagtgaatgctcaagacgttctccgctcattggctggggtggggacctctgtgctctgtggggtgttccgcagcctccccacctccacccctggggatgccaggagcaccctgcccctaatgtgacaatcaaaaaggtcaccagacatcgccaagtgtcccctgcggagcagatgtgcccgcatggagagctctttgtgtcgaccatgactgctttttgtttttataaatggggaagcggacgggcagagagggcaccccaggaaggtcctttgtgtgcctggtagagctgaggccccctggttgggacagcagtgcctcccgccccccgactcgacttgaggcccaggcacttggtgtcatgcaggggtgtccagacggcctggtgcaggatccctttgatgtggaggagggtgggtccctgcccgctagggtggggcagggtggttctgtgagaggcggccacttctagcccttcgtcctttctcccttttgtgtcggtgtcccccagcgaggcccaggacttgttctcacccctcccttccctgcaggccagccgcctcctgggccccctggccttccccatggcctttcaggggtctgcgccctacctcctcacacagcacaaagccaacgtgccccaccaggaattcccacctcacccctgtggcccagccattctcccgtgtggggacgcgtggacacaaccctgaggaggctgggtttcttctggcatcgccgcagacatcctcctgctgacccaagccccgaagcccgcagcttcctgagctatttgtgtctcattcacatgtgcggtttccccttcccaggacccccggctgctgcgtcggcctgaaaacacacacaggtgctgaggtctcgtagagatggtgccgcctgccgtgccacggttttcctcactgccgcccccacccctctgcacatggaaccgggcacccccacccctgtgctcagccggtcactgctctgtcaaagcgacttcagggatcacctgcctgcagctggcttccccactgcactttgggtttgccagctcattcattcattcattcattcattcctctgcttgcccttctaagcctggctttacaaactcgtattttctccacattcattaaaggcagagagcatgaggccgagctcctgccctgccaggaggtcaggtgcccttcctgctacaggagaacgccgtccaccaggcagcagggcctccagccccacaggccgggcatctggagtttctccaggtcctgtgggggatggcccgggtgcaccccgcccagcgggtctgttgaatgcagctgccaggctagactcacgcccactgacttgggatgtcacacagagacttgcagccaagaagacagagcctgctccccagccctgcctctgcatcccaggtcgtctctggacaccagccacatcatgggcacagacaagtgtgtggggacatgaggaatggatgatgggcccctctccttcctggcttgcacattcctttagggtaggatggtgtctcactttcatatctcatcaccatccctggccgtgcgctgcatacagtggaggcttgataaatgcttaatgagcgtgtgccggcaagtgcctctcagccaaggcatctcgcaagcttcccaggctctctctgcgggagccgcctctgatctgcacaggcaggcaggagcttggccacgcaggttcagctgcagtccccagagcagctgccactttgcatagctgcgccgtggagagcagagaggggctgggaggaggcacgtgcttgtcttgtgaagcaggtcagaaatggccactggaaggccaggcggtgcaggccagggagccccctgtggctctgtgcacccagcccagccccccagccggagccctccaggaagcctctggccaaaagctttgactccagccagagtccctgggagcagccggcagggagagctggagacagatgttttgagagctcactgatgccagaaatgaaataaaaaaaaaaataattaagagcttggactccaaaggtctagggattaaaattccccaaggcaaaaatgagctgtaatcaaaggaatggtgggctgttatctgtcctccacacttgtcgccctggcacgtgtggttggctttaattattgatatttctttttaagttaaagatgaatttgagacagctgcgaacttggacagttgatcttccagtgacagggaaacctgttagtaatgatcacttaaggcggccgcggtttttccagccttaacagaggtggccagagccatggagaagaatctaggagccccagacaagctaggctgccctgtccctgccaaaaactgtcccacgcggctccctgcccccatgggaaggtgctcggtgcccagcgtgtccaggttccgtcctccctgcagcctggagcctgagtccgatgcggcgccttccttagatggtcttcaggcctctgcaaatggaaccagctgaacaggaggcagagggtgagagtcagggagtcccctgtgactcagcgcaaggagtcagggagacatgacctgtggctcggaggacagctgactgccttgtcccagctttccacctctgcccgggctccgaggcggtgtgaggcctctcacattgctccctgacacccagggagcctggcagaggcagcatcagccccagaaggtgccgccgcttacagccatgaacacaggatgcagagcagtgctcggaggcaaatccaccccagtccctcttggacctcagccaccatccccagccagcccagtcaggcgtctgccagctgccagttatgccttggtgtgtgtgcagcgcatgttgcatcctcctaacacttctgtactgtgacctcatggctgtacctgatacacctgggagtaggacttgggcttgaagagtctgcctgggcgcccgctcacaccagccactggggccccaggatgctcttgaccacggtcagcagggaagggcgaagtgtcagagatccccaggactctgcttggctcagggcttgtggtttagctcaacatgggacgctcagcggggcaggtcaggcagggccttggtttggggctcacacctgctgggaagggcacggccacacctgcaggcccctggctgtgggatccaggctccccgttttgcactgctcttgcatggggcttcagcgccttcctcctcctcttggggaagaagtcacatttggttggaagttagcttatattgtgatttaaaattctcccagagtccaagacactccaggatcccaaagttagtgttggcaagaaccaacttatggattataattcttggtcatgttcagatcctccctgatacccatttgaaactgaaatgactctctgggtagaaataggtagaaaacagggttcagttattcattcaccaaacccgtccagagcccttcagttgctggggctggggtagagcatgaacggggcccttgctacatttctgtgcccgtgggaaggtagacgggtgaaacccacagttactgacaagggagacacaaggtaagaaggaagtgagcagggataggaggtgggcgtgccccaggaaatcctggagggcctctctgaggaggtgacattgactgaggaatgagacaggatctaacgtgtgaggacagaggagaagtccagaggttcccagtggtctgcagttctgcctgctaagcaccgctgtgtccaaggtgttcgagctgggactggggatgcacaggggaagcataagacagcgtggctcccctggaggcccctgactctcccaccgtgatggctgctaggcgtttccgtctgtgtccactgtgcatgtcaccatagtgctggggacgcagagctgtcccgtttggaagaaaactatggactggagccagggcttcaagttcggtggggcttggttgctttgtttaaaagtggggccatggctgggtgcagtggctcacatctgtaatcccactttgggagaccgaggagggcagatcatctgaggtcagggattcgaaaccagcctggccaacatggcgaaaacccctctctactaaaaatacaaaaattagctaggctgggtgtagtggcatgtgcctataatcccagctactcaggaggctgaagcaggagaatcgcttaacctcgggggcagaggttgcagtgagccgagatcacgccactgctctctagcatgggcaacaaagcaaaactccatctctaaaaaagaaaaaaaagagtggggctcaggaatctgcattctcaggtgcacctctgagattctgactcagactccatgaaccacccctgaggagcaccctcttggctggcttctgccattgtctgccacagcagcttttgttctactgggaagtggctgaaggtgtggacagcagtgggggtggcacgcgtcctccggccggtagtaagtgaatggggccctcaggaggcgtgtcctcccttgcaactgcagaccacaagacggcgcctccccacccagccgctgccataaggagccaggtgtgggtggagccacgcaggttatttccatctgacagtggggcaccatccagtgcatcgtgaaggctgcgcaagtggctgtcgggatgatgccaggctctgctgacacgtcagatcatccgggatgcgctggcacacacgtgtagcctcctgtgatgtgcacagcacaccggggcaggctctgagtttgcttgcttgagtttggagtctccaccagtgcaaccttcagaagaaatgctcctggggcggagagtgaagcgcagggcacatgcattcagtgcaggctgtgaaggagcatgttgggatggggcttgtttgcttgaaaacagaaattcagttggaggccttgccctgcctatctggagtgtggctcctgagctgtgcacttatacaatacccactatatcacccccaacaatcgaccctgtgcttttcagcaaaacagtgtcaccgatccttccaactcaccacccacaggtgccaggataagtgtgacccttgccccattaaaggatggaagcatcgttaacgccgggcctccgggaaatgactttcacacagggaacctcaaggctgctggaggcataccagcccggcttccccctcccgggctgggtggtctctcctttgtagaggcagcccccactctaccctccacccactccacccactcgtctgctcacatccatccatttccccacctctctttccatctccccacacacccacccttcctcccctctcacttcccccatgtacctgacaagccaccaaccagccactcactcattcatacttttacccttcacccatccatccctctactcacccactgacccgtctgcctatctgtactcccctgtgcaccacccgcttcctcttcctctcctcctctccccaccctcccaccctcccacccactcacttctccatccactcacccatccacctgtccatccatcaacttacctattggctttacgttgtctctctatccatcttcttatcctcccatacaaccatatacccacccatccatcttcccatccatctacccatccattcctccatctacccttccattcctccatccatttatccatccatccatctcttcattcacccatccatctatccatctatctgttcatctatccatccatccatccgtccattcacccacccattcatgcatcctcccatccatccacccattcatccacccatccatccacccatccatcctccatccattcatccatccttccatctcttcattcattcattcatccatccatctatccatctatttattcatctgtccatctacccatccactcatgcatcctcccatccatccactcatgcatccaactctccattcatctatccatctcttcattcattcatccatccatctatccatgtatctattcatctattcatccatccatccacccacccactcatgcatccaaacatccatcctcccatccattcatccatctatccatcagtttattcacccattcatcctatccatccacccatgcatctgtctatccttccacctatctgtccatctatccatcaatgtatccacccattcatcccatccacccatcaccaagttccaaaacatgtaagacagcctagatcttcccggagaccatctatcatggtggtaaaaagcatggtttctggcagcaagggtgagttgtacaaccttcctgcaccccagtttcttcatctgggaaaggaagtgacaggagcacctgcctcttggggttttggggagaactgacgagaccgtcaatgtgatgcccctgcacagagctcagtccagggctggtgctcagtgatgtagcctgcagttaatgtgcactgagtgccatctcccccccagctgtccatactgtgctctttaaacacagagacatctaattgctctcagaaacacgagggctttctgttgtttaatagcaggagactctgatggaaaatcccagttcagattttaaaacaccaccaccaatcccaaatgagttttcaaggcgggttctgcttctctctgcaagtgaaacctacggcaagtcagtgtttcagacccagctaaagcccggtttttccatctctaacagggaggtgctattatttacctgatccaactcagtgggttgtttaggattaaacgagtgacacatttcatgaaagggctctgcaaaccgtaaagctctgtaagcagctcagggcatgggccacccccagccacacggacagggagagcctcttcaccctgtatacccctccttcctgtgtgtggacagaaatgggctcatttacgcactgaacacacacgcagcaccttccgagcccccagaaggaatggtgaaacaaagggaggatgagacagtcccgtggagctcggggtaggtgcctaacaccacgacagctcaggcagagagcagtcaccccacacagcaccccacaccggtgaccctgacttccgcgagtgttctccacacccatagatctgcagctttaaagcaacaatcccagaggctgcggggcaggacccccacctggatcattgggggctggagcagactttgcaggaagcatctgtggcctcctgtgcccatcgcagcaatgtgtgtgtggcacccagcactcctgggccgccccagcccgttgctgggagcttttttcccactgtggtaaactacacttaacataagcgttcgttttaacactttgaagcgcagagctctgcggcgttagtgtattcacatagctgtgcggacatcacctcctccagaattctttttcctaaaataaaattctgtccccattaaacacaaacttcccacttcccctcctgccaggccctggcaaccgctgttccactgtccgtctctgtgattttgactgcactatgctcacataaatggaaccttataataattgccctcttgtgaccggcttatttcacttagcatgataatgttccgaagcgtgtgtcggaattgccttcctttgtaagtctgagtggttgccattctatgtagaggcggcactttgctttcgtgcccgtctgcccgtggacactgggttggttgcagccacattttggtgatgtgaacggtgctgctgtgagcgtggggtgcagacctctcttcgggtcctgcttcctgttccttacgatgtctgctgagaagttgaattgctggacccggcagtaactctaggtttaattgtgtaaggaactccaagctgttttccacaggggcctcacggttccacatccccaccagcgatgcacaaggcgtcccctttctcccaatccttgccaacacttgtgaatgtctgtttttttataatagccatcctaaggattgtgaaatggtgctggggctttttgcaaatataaccaacccagtcaccgcccctgggagaatggtgacttggctgctgcgggtgatgtgccctcacccatcctgtgcccaagaggggctggcagagggagggccttttgcctgcgttttgaaggcagaccttcagggtctcagctggctcttctgtgtcccctccatgttctgtttgactgcaggcatccccatggtcccctgagaaggacagggcacaagggaacgaggggcgggcaggggcccaggggccgggcaacagaggctgggctatcaccaccagagagggcatcccagggaagctgcttgggaattctgggggttggagtaggaggaggaggattctctgggggctgaccagttttgcacacacttgccacccacttctgcctgagcgctagggctgcaagcacgtcttcctggtccgcgcctgcccccaggatttccccactgtgctcccagagcctgcccgcccatagttggtcctgctagactccagagcagggggcaggacacaggcctcgaagctttggaaaatgacttagtggcagtgggggcttcccgcagtcttccagggaggggcagagagcattttcctgagccccagaaagtgtggccgtgacagcagcaggcctgagtcctctccagtacaaggcaggcaggacgccagcggctgggcctgctgatgaatgcggggggctccacacgcgtgggggtccaccgtgggtcattcttccgagttttttcctcatctcacttccaatacagaaagcttgccccgcccttcctttggcaactgggctaatggccgttgctgaaatttttaggcagtttaccttctgcggattcacttctctttaaacttcagaccatgaatcgcataagaaaaagcactcccagagcctctcaatggaatgtggcaacagcagagccagtgtgaaaaggcagaaagtggctcctatttaatctgggagagtttggctccaatcattaaaaatgaaagagagaaaagaagtttctttttaagagagagacctgctagggctcttgttccattaataagccaagtgatttttaaatgaggatctttgcttgaataattcgttttatcatttaccaactaaaatggaacatcaatccctgttcccgtcgcagggctgtccccggcagccttgctgccttttacttgtctctgagcccagcgagcgtggccttttgtctatctttgcgaggctctggcctctcttccacggggctttcagcccagctgtggcctaggatggaaggcaggagacaaggctgcccgtcccacctgctcttctcccagcgcctggaggctccagagttccacgccctcccctggtgccccagactcctgagtcgctccgtcactgtgaagcaccaggtgcctgaaccccagagggaagcccaggaagcctccacaggggcggtagaatgccaggctttgcaggaagattctaccaccaggctgcatggagggcagctagctgggggcccaccctccctgagctgcaccagggccgggccactcacctcccctgatggtcccctgcaaagactgcagcagcctctgccagttctgatccacccctcggcgtgcagagatcacctggactccagtccagcaaaggttcctgggtccattcgggggcaggcaggggagcctcagtttggggtttttgtttgttttgccttctttgctttttgcttttgtttgtttttcttcaagttctgctttttaactttttattttgaaatatgtaatcatgattcatggagagttgtaaggatagcacaggggtcccaagcaccctctcccaggaaaggggcacgaggaagctagtgaggggatgcgcgtgtgtgtctgactctgccgtttatcacacgggtgtatctgtttaaccgttcttaggctgcatagccgctcccacgaccagagagacctcccctacccgcagccctgaggctgaatctgggtgctcagtgcccaccctggatctcctctgagggtatctgtgaagctgaacatcccagtgtgaacgttggaggcgcccttaagaactgccttggttacctgcttttacctgaagctgcagctctttctcacccctgtgtctcagctcttggcagtaactccaagaagctgtcctgtcactgccctatgtcagcttttctgtgaatttcaccttcctttttttctcttttattttttatttttacttctacgtactttcttcatgtcatgctcccattctcccttaacaagcatctaaaccatataaaatattagctttgttctcttctagcataaagcatctgtgacatggtaagaaaaatgacatgaaaatatggccgggtgtggtggctcatgcctgtaatcccagcactttgggaggcggaggcgggcggatcacctgaggtcaggagttcgagaccagcttggccaacatggtgaaaccccatctctactaaaaatccaaaaattagccggacatggtggtgggtgcctgaaagcccagctatttgggaggctgaggcaggagaatcgctggaaggagcccagaaccaggaggcggaggctgcagtgagccgagatcgtgccactgcactccagcctgggcaacaagaataaaactccgtctaaaaaaaaaatgaagagaggagaggagaagagtcggggagtgagatcacagacatgaggctaattaggaagttgaaagacagccaaaaatctgaaaaagaacagcatccaccatagacgagtggaagggggcacacattgttgagggaaggccccacatataaggtgctgatctatggatcggctgcccccttcacactttcttcctgatctcatggcagccctgagtaaacacttacctcgatgagtatttcctgctcaccacattgctgaatgaatgaatcctaaaggagaaatgagatttgtgtggtggctttctagggagagtgtgtcctggcaaacgggaaccccttgtgttctgtagaatatcctaatggatttgaatatggcaagggtgttaaaagcataggagaactgctgagatatgaacagaagagcaggaagtgttttgaactctctggggggacactttggaaggaagtataatggatggaggagagctgggagggcagccgggtgacatggagaccaacaatgggaagggccctggtagttcccagggtattggctgaagaacctggtgaaatataaagatacctgtcattcaatttgaggcacaatgtgcacgtaaacctttcctttcttcctctctgcccacattgtgagttaaatcctttgaaaatgggttggtttctggttttacttcgacatctgggtagatgcaatgcaaaacagaggtgctctatgggagatggatggatgacggatgggttatgggacagaagcaaaggtgaccctgaaaactgaagcaccctgaaaattccccaagatctcagtgagacttcagattccgcacagtgtagggtagggaattgaagccaactcaggttccagggacccacggaggccaatagtcactcatggcgttgtgataacggaatgaatgacgccatgtggagggcagccaaggctgcctagtcatgttcatcaaatgtcagtccctgttattactgccggtagaatgaatgaacacgtgcataagtgaatgacaagagaaagaaaggggcagcaccagcctgtgtgcgggataaacgacgtcccacagtatctggcgacggttctgaggtccgtgcaaggtggtgaattgaaaatgtagcacagcagggatgtatcatgtagggcctgcccctatttcagtggtggtaatctgtgcaattatagtctgtgctgttacatacccaccattcatacagggctttccagggcattctctgcattggtcctcctttggaggcggggggcaagcatcagactggcagacactgactccctctgccagcagggcggctcagcatggcaagtgccattgaaataattgatttcttgctttgattgtgtaagatggctgctctgtcatttccttggtatgctggctaatgttcaatgcttacagttcctaacctgaaataaaatcatttacgatattaatttctccacataacctctttaaggacttgatgaaagccttgcctaagaggtcatcttgatgagacccggagtgcaacattattgtggggcagaagggatacatcgcgtcagtgcttgcctgcacacgggccctgactctgcatggttttaaagagaaagaggctgtttccctaacctgggtctcctctggctatttatattcttaacgcagcgcagaaggctcgagctttgtggggactcttggatctgtgaacagcgtctttatttcttggtgggctttaggtcagctggccgattattttatgtcctttttatagtgagaataccattgtgaacagaaaattatctggctatctcacaatgaaaatgcccatctttgtcatcttggagccgctgtgtcagatgctgaacccaaacccagctcggcttcgtcataattgccttctgttcagttttgaagtaattactgtcttataggagttctgttgttttatcttagtggatagttcacttgggagagctgatgggaaaaagaaagccatagatttggcttccccatgaagctccacagcttctgatggttagtggtatattttgatataaaatcccagagaaaatagcaagatctctctaactggaggaaggcgtgcgctcaaagtcgttgactcttcttggtctttgtgacattatcagcagggaaacccaggccagccttgcggcctggtgagactggaagccagctcagagagcacgcacagcagcaacgtcacgtgcctcggcggcctggctcacggccgatgcagtagcccacaccatccagggtgcatgagggccccagctgcagagatgaatgtgcacgtgcatacatgcgaatctgactcagaagacaagcatgcaagtagacacattttccgagtgtagaccaaccacccagccctgtgctggcttccggggcctatgagggggctgctgctgttcagggggattggaggagggtttagagaaggggaggagctattgtcatgtgagtggaatactgccaccatgatgagacaggtaaaaataaatctgtaggttggagtccgggtcacacccctcgaggaggagaggagggatgcttcgagacggactggagatgcatctttaagagttggcaggaatttgctggcagagaatttatagagcagccttgaatccatacatgattttcctactgatggaaaattctgctttcatcacccagcaaactcagcggagattaattaaacatgagacactgattaatgtttgaagggtagcgggagtgtgggctacgctgttggtctgtctttgggtgattcttggttccgtttctgctaataactccttaatactgcgagttccagctctgagatgggggaagcgagtggtgccgggcaaggcagctgggcctgctgtgggaacgcccagcctgcattctggagggtggtagctggtggctacgtttgctgcacgtggctgggcaggtgggtgccagaggcccaggtgggtccctgggacgtgcacctccatgttttccccagccctgtgctgccctctcagctgcaggcgctgggcagggtggggcacaggaaggcggcaggatggaaggggaccccggagagggagaaggcagcctggcacagggtctggggagaggaaagcctcgatgtagctatgtgccagtgatttgggggagttttcagccctttccccatttcatgattgatgtctgctcagaggcttctagaaggttggcccttttcatccgctcagcacagaggatccaagggagctcagcagggtgggccacccctccagctccccacagcccacccctccagctccccacagcccaccggccccttctctcagttgttcccacaaaccaggccttctcctcccaaccccctgctaccccagagccctcaaggaatcatcagactttgccacctcagttcattctggctcagaatacatccctcacctcagcacccttggtttagcagatgtttccagctgcctagtgggtgtccagaaagccctgatcccaccacacctacagctttgggatcagatggggctgcctgacccaccaggcaccacagcacccaggacacctacagctttgggatcagatggggctgcctgacccaccaggcaccacagcacccaggacacctacagctttgggatcagacggggctgcctgacccaccaggctccacagcacccaggacacctacagctttgggatcagacggggctgcctgacccaccaggcaccaccaggcaccacagcacccaggacacctacagctttgggatcagatggggctgcctgacccaccaggcaccacagcacccaggacacctacagctttgggatcagacggggctgcctgacccaccaggctccacagcacccaggacacctacagctttgggatcagacggggctgcctgacccaccaggcaccaccaggcaccacagcacccaggacacctacagctttgggatcagatggggctgcctgacccaccaggcaccacagcacccaggaccacgtgatatttagcagcctctgaaatgttttcttttaaaatcagaaagaaaaaatgagtatggtctagcccaggttgtagtcatctttttaccaatacggtcatgaatgaaatataattcttaattttattgttctagaggaaggggccaccaaggcaaaagtgcctgaggcccacggaagtcctagggcaccctggggtttggaatggggaaccagcaggtggatggcagaggggtgtggaatggggaaccagcaggtgggtggcagagaggtctacactacagaaggaagtgcttaccaggctgggcagcaggtgtgggcaggacagaaggcttaagggggagggttgttgaaggtgatcaaagatgagaacagagaggtggccagagccaggttgtatctgcaggcgagaacttggggttttacttggagcacaacaggatctggtgggcagtttgaagcacaggcagacacgaaccgcatgatccttaagaatcccccaatgaaggcagaaataaaagtcctcttgcttttgtttcctattgtgctgtaacaaattaccataagctgattgccacacagtcctgtaggtcagaagtcttacagggctataatccaggtgtctgcagggctggttccttattgaggctccaggggagaaaccacttccttacctttccatttctggaggctgcctgcattcctcagctcgtagctccttcccccatctctgaagccagaaaatgtatcatttagacctctgcttccatcctcgcatctcctactctgattttcctgcctccttctttcccttttaaggatccttgtgattacttttaggactgacttggatgatacaagatgatcccctcatctcaagatccttaactcagtcacatgtgcaaagtcctagttgctatgtgtcttagtccattttcagttgctacaactgaatagctgagactgggaaatttataaagaaaatgaatgtctttcttttagttctggaggctgtgaagtccaagaccaggcagatgcatctggccggcttcaggtcagggccatgcactgtgtcataacatgagagaaagcatcacagggagggggggtgtagagagagccagactggcttttataacaggcccactttcgtggtaacgaccccacccctgtgataacctattagtctgttaatccacgaatggctctgccctcatgactcagctacctcttaaaggccccacctctcagtaccgttacattgggaactgagtttcaatatgagtcccagaggggacaaacattgaaaccatagcaccgtgtaaggtcacaaattcacaggttctggggattagggcaaggccactagggggaccattattctgcccaccacacctctggagagagggaaacgtgtgcactaatgccctgagtgtgtcaggggaccaagaggtgcatgtcccatctctccttcacccgtgtgtcccatgtgtgttgaagaacacagcatttagtgtaatcggaccaggcttcctcttgagacctcaggactccaccagctcagaaactgttttctgtggctgtcattggccacggtggctcttctttgatcagcaatgctgtacacagccagctgctgctacaccagatcctcacggttttctgttccatgttctttaactttggacccgccctttccttaatccatctgagttcccctcgtcatatgtgctttggcactggggcatccccagtaggcggagcccctgctacatgagtccagaaaaaaataaatgattccaacactagttaaagaaggcaaggaagactttctgggagaattttgctagaagggagtggtagaattcaactctgaatacagcaaagacagctgagggttgacagccagtgagcagagtgaggggtcaggggatggaaaattacagacaggaacaggattggatagcaagggtggggattcttgctaaaggcaggccaagcagttagataccaagggtggggaatgaggaacttgatccaatatcaggagtgtggaggagagtttcagtgaatgagctgagctttgccaaaaccaggcttggcaggccaaggtcaaggctccgtccagaagagggcccagaggagactgagtgaagttctttcaaaaagggaggccacgtcacaggcgcgttttaatcatcggagcactcctgagggtggaacagggtcagcacctcctcacagatgcacagggctgcgcagagcccttcgaggacggggagcagaggctcaaagccaaggccagtgaacccgcctggtgccttcgacagctctaccatcctgccttggcctccccctgcacccctcaagtcctggtcccagatacttgcaataaaggagccacagagcccccgctttgaatgacgtgagcgggctttccaggaaggggaactgccaggatgagatgattaccagccagaggagaagcacaaggtcacggagcgggctcaggaggggcggtctccccaggccccacccgctgcctccacaaccagggcaaagccagggccagaggggcttcttcaacaacatcaacaatccgtctatgtggtggggctctgccctaccgttcctggcttcgtggagttctgaaatactttgtgcataggaaggggcagcccaccgtcagccaggaacagcagtccacaagctgatgtggaaaccctcctccccggcctgtccagcctgcagaaaacacatgctgtgagctggatccaaaacagagaagcatttagggaggagtcgctgagtcgtgcggcctgaggaagggaccccgtcagccgactccagaccagcctctcagcttgggctgtgggcgccggctctctgtgtgctcacatggcgggcgagctcccgggagtctcttcttacaaggtcactcatcacaaaggccccactctattgcctcagttaaccttcaatacttccttggaggccccatctccaaattcaagcacactcaagttagttactaggttttcagatgcattctttccctgtgttgccaacagtttccattgttgtgtgcttgtaactcttgatcccatctgccttttggaacagtggataagagacagccaagtctagaattccagctttgccctgcatggctgtgctatgttacctagggcctgttacttaacctctctgagcagcaagttcatagttaaaaagtgattgccggccaggtgcagctgctcacacctataatcccagccctttgggaggctgaggtgggaggatcacttgagcccaggagtttgaaaccagctgaggcaacacagtaagacttcatctctacaaaaattttttttaaaagttaaccaggtatggtggcaacacacctgtggtcccagctactcaggaggctgaggcaggaggatagcttgaacccaaagtcaaggatgcagtgagctatggtcacaccactgtactgcagcctgggtgacagagtacgaccctgtctcaaaaaaaaaaaaaaaattaactgctaacatttcctggtgcttctgcagtgcagggaaccatgcggagagctgcacacccactctatttcaccccccttcaaccacccagaaccacagggtgctgtggttatcacctgcacacactaagggggaaactgagtcacagagtggtgaggtagtttgcccaagatcacacagcctgctgtgtgatggagccatgactcaaacccaggtcttctgaccccagagttagtcctgccccctcttataaggtggagggaaagatagcgccttcctcctgagggtggtggataagagggcagacagccagtctggattccagctctgcagtgcacatgtctgagactcacaggcaatattgtgtgtacagggcctggcccagccccagcatgcagtgagctcaggagaaatattctaacagtctgtgtggtcactcacagcccaggtcatggtttccaccaggcttggaatcatacccctttcagctcagaggaccgagcatgcagtgtgattcccgcggtgggaagtcagctcattaaagaacccggcacctagatcaggggcctcttcacgctgcctggatgtccgttcaggaactcggctgaaatttaaacctcctgacactctggtccccaggccttcacacactgggccatcttccgtgagtgtttattcagcccgcacctgctcagcatccctgttcagagctctggtcaggcatgttcctgccacctgacagccacccttctgaagggacacacacagaggaccagggcacagtgatcaccggctgtgggcatgggtgtcagacacacctgggctcaccctggctctgccatcttctacctgtgtgaccctgggccagccgttcaccccctctgggcctcagctcattgtcaagtagagagaacggggttgctgtgggggatccctggggggacgaaggtaaagaggggccgtgccctggggctctgagcagcttctgctctcactcctgcaggcaggtgagggctacagacacagatcaggcctcggcgccccggctgctcgcctgcctccctgagtcccagacacatcagcctccagttcattaaggccaagagcactaaaaattctgcagaaacacttcaaggaagggctatgaattaaataaccacaggaaagcttttgctaaggagttaaggctaaatccagccttaaacatttgattagaacattttctgattccagtgtactggaatactgaacttccacgttggctcaaaactgcaagtgtggttaaaacacactgtctgtgattcgggaagactgggaaagtgaaggctccagggagtgggctctcgagcgtttgcctagtgagttcacttcagccattcttgttgttcttgacaattatgcaaaattgagcacaggatgcttggagggagagagggtgacacccacccagcctgtcctctccatccacacgaatgtttagggaaggagatgcctcatccagccagtatagcgccaggcacgtgttcccaagcaggttcccttgggttcccagcagctcagccttgggtaggatcagggtctcatgccccaggtgattggatccagagccaccaaagtccccttgcagacacccttccttgcgggtggtacctggctgtctgcctggaggcatctccctcacgctttgccctagcgcaacttgtcctagcagaagtccaaaaacatgattcacatagaattgtaaaaagccaaaggggtgatttgcagaagtaaaatgaaattgtcaaatgccagaaacacatgcttttatgtctttgtatctcaaagtgatagtcaaagcatctaataggaaaaacacatcagtatgcacacacatattctctctccctctccctctccctctccctctccctctccctctccctccctccccctctcctctctctcctcacaaggtgtcaaggggctttaggtacatgggtggggaagatcttccccaccaggctgatccccatctgggaggctactgctggttttccaaatgtggagaagagccaggctggtgttctgtgtctgtggggtgcttgctctgtaggtaccacggggagttgatcacaggccctgacccatctattgcctctgaatgggtgtttgcttaggacagtacagcaatgtgtcagactcagagggagaacagcccccaggggacagttaaacagcagccattatcagaagcacaaaccgagactggcagtctcaggccacactggtcatgagcacacccctgcaggggctgcggcctgccgagtgagtgggggatggacacaggttggccggcaggaaccctgactgctgggtgccaggacagaagaggagacgcttcccaattaggggcacgactcactgcaggcaggcgtgggctccagccacctctgacttcccttgcctgccattgccctcagaggagcgcaggtgcagaaggcaccggccacaccacaccatcgattgagtattgcagggaacagaaaaggaagatgaagacttgttcaagatgctaattcattgtctgggtctttctgatggaatgtgggaataggaggcagtgagaaggtcagggctttcagtagggaggaagaagggtcagcccgggttggagaggcacccgcagctggtgattatcagagcctgcttgtgcttgcattatgtataaggactcactcctctgtgcagacaggatttctcacttaacctctgagggccggcagtgtgatgtggagaaggcacacagacctcaggtccaaccgagctggaggcacacccgggtccgcagctcctcacagggccagctctgccgagccccactttgtcgtctagacagtatggggtggggatttggaagtgaatgctatgatgagcttgctctcgcccatccttttcccatttcccatgttggagagtctctcatcattcctttaccatcagaaccactgcagggggtgaatggcgagaagagctgctggctgcagggcataaaggtagctttttgaggcgcgctcccagggttcatgttgagccaagtcaaaccaccactctgggtcccagtatttgcatgtgttacggggatagcaatggccacacctctcccagcttgataacgaaaaccaagtgtgttaacatgtaaagtgcttagaacagtgtctggcactgcgattgctgactacaggtttgcaggaatcctacttttatgggaaggagtttgtcctggagtctgtcctgcaggtggccccacctcgcaggtggccatcgggggccatctggtcagccctgctgcaggggacttgcaccaacctcctctcctccaaatttaagattctcaattatgttttatctatattcgtttattttctagtgatttcatggttttagctctgccttcagcatgagctgataacagtgatggtcacatatctgactaattccagccctgttcaacctcacctgcacacgtgtgtctgccagtgggctcttcccccttctatggctgccagattccaactacatcaagggcgaagaccccacagggccccccgagcacgcacgctcaccttttgcatcacagacccatcctgtggccagagcccagggtcaagaggagcacgtctggcagagagttcaaagaggcgtgctgggctccgctgcctggggccgtgtaggccaggtgtgtggcatagatcttcctctaaaccctttgtactttctccctcacttctttttaaaccaccttcccttgcacactactccactgaattcatttttgaaattctggaagttgtacatccaggtcaccgcttatcagttgtcatgaaactctccttcgaaagtgaaaaactgacatctctgcggtggagacagggaatcaaggagcccggcactgatgacaggtgcatcgcttcctgcaggaagagacttgtaggcttgactcctgccgggagcgcgcgtggctgaacgggggctcggtatccactttggaagattggatatttggaaaccgcagagcagcttgcaggaagcgtttgtgtttgtgattagcttgcaagaagagcatggcgggccgtgagcaggtctgtgatctcttactcccaggacagtcccttggccctggactcactcgttatttcctgggctgtgacacctgaaagaaggaagactgaggcaggaccttttgttagcctgtgtctgacctccaggacgctgagctatggcccggctccaggcattgtggcctgggatctgagagtgtgaaactcactgcagaggatgccgggccttctgcctgcgccggagccctgagtctccccaggttgtgccagcagctccactctcctgggcacatttcctaaatgggcagtcagcggctatcccagtcttacctgcctctccttcttgcctcttccagtgtattctcctccatgccgctgcccggcccatcaatattcttataccaaaaattagatcatgtgactgctttgctccaaatccatcagcggctctgtatcccatttggagtgaaatcagaagaatctcttccacaggggccctccctgctctggtcaccgctgacctcgtttactgttcaagattccagctgcgtgaaaacagggtctgtgttttgttcaccagtgactgcttagtgctgtcttgcacagaggcagcaatctgtatatacttacttgtggaataaatgccatgtttgtcttctctaatgggctgtatgtttctataagttcatatgcataagatatatatgtactgcgtatctggaagcgtgggtaaatgctggctgatactgtcattaaccggtgtatcttcatattagccaggaagcttttctattaaacatttcttccctcttactaagcatctactgtatatcaggccctgtgcacagccaggaggacacaccctggcatgagacaagtagcttccccacctttagaaaaactacatctagaatcagcatagatgatccacccatatactgagtttatattgtattttaaaaggtttatttccatacttaaaggtaacaataattacaggtctttagtgatgctaattcagaaataagtagtattttgctagtttttccaagagctaacaattagctccgtctctcttgctggtgtgagatgtatttcatgtagatattagcagggggtttaatcaacacttccatacacagattatctatataattatgctcttcagtggccccatatttatttccacccagggctaacatcgaacctttactgaaggtggttttaacccatggcgtgcagcacagagggcactggtgtgcttgtgtgagttagcctcgtgcttggccgtgcactggtgtgcttgtgtgagtgagttagcgccgtgcttggccgtgcactggtgtgctcgtgtcagtgagttagcaccgtgcttggccgtgcactggtgtgctcgtgtgagtgagttagcctcgtgcttggtcacgcactggtgtgcttgtgtgagttagcgtcatgcttggccgtgcactggtgtgcttgtgtgagtgagttagcatcgtgcttggccatggcagtgagttctgattgcagggtctcaacgctcagggaaggacgagtgccccttctgtgccattttccaaaactctagggatattgagtcttgctcaggtcacccaaaggcacatgtcccagccccgagtcaagcgtacaggggcctcccgggagcacccttgtgcctgtcgcggcgttcctctccttctgccgctttcccaccccttatgaccggcagcctgtttcacaggggtcctaggtgcggtcagcccccgcctggaggccacggggcgccctgagcagtgtgtgggttggactcacacctgcaccgggactctggcttctccatttagttgccctgttacctcaggcaggcggccccacctcgcaggtggccatcgggggccatctggtcagcattgctgcaggggacttgcaccaacctcctctcctccaaatttaataattcccaattatttttttatctatattcatttattttctagtgatatcgtggttttagtatctttctcaggattctctctgtcttaatgttaaacacaattgtttaaaaaatggcattccgattttcagtcattctgtctttgaggctgtgggtgggaagccatcggggctgggcgtgccaggcagggccccagctctggggtggaagggaggccctgcaatggtcctgctactgaggcaatagaaagtcacaggggagaggagagtcccgcaggaggaggtgatggacccactgggtggtgaagaacagtttctcttccacacatttatttagaagatggcctcggccaggacggcagcctgtggtcccagggaggaggaagagtgagccaggtgccgtggggtctgtgcacgtgccagcgcttttaatgtcaccgtctctttattaaagtacataatatacactcatgataggaagagctgaaaatactggaaagaaaataaaaatcctacagaaccccagtatccacgtgaaactatggtgacaccttcgaacagttccttccaccctcttactcctttgtatacgcagctatgtatgtggtttcgcttattgcagtgggaccgtaccctacatactaaatagcacgaggcttggtcgcttagcagtaaccatgcacacctgctgttttatacatttacatcactattttaaatgactgaattcaccattatgagataactgtcgtctatttaagcgtcctttatgacggttggctgagttatctctaatttttcaagttcataaataacatggggatgaacacctttaatcttttttgcatttgtctattatttccttagatacattcttaaaaataggagtctgaggtcacgatgcatggacattgataatgcttctaataaatacttccatatcatcttcagaaaaacccgattccatacatccccaccattggcattagagaaaagccactcaaattcatggaatcttgaaattgaatttttcctgggtagattcccaagggttatacttaggaattaattcatggggtgatttttttcaaatgaaaaaaaaaaaatacattttcctttcccataatgccaaagaaaaatcaagaatttttttttgggggggggataaaaaatgatctccctttattactctcccaaaggttaccagtgtttgaatttatttatttatttatttatttttttttttttttttattgatcattcttgggtgtttctcgcagagggggatttggcagggtcataggacaatagtggagggaaggtcagcagataaacaagtgaacaaaggtctctggttttcctaggcagaggaccctgcggccttccgcagtgtttgtgtccctgggtacttgagattagggagtggtgatgactcttaacgagcatactgccttcaagcatctgtttaacaaagcacatcttgcaccgcccttaatccatttaaccctgagtggacgcagcacatgtttcagagagcacagggttgggggtaaggtcacagatcaacaggatcccaaggcagaagaatttttcttagtacagaacaaaatgaaaagtctcccatgtctacctctttctacacagacacggcaaccatccgatttctcaatcttttccccacctttcccccctttctattccacaaaaccgccattgtcatcatggcccgttctcaatgagctgttgggtacacctcccagacggggtcgtggccgggcagaggggctcctcacttcccagtaggggcggccgggcagaggcgcccctcacctcccggacggggtggctggccaggcgggggctgacccccacctccctcccggacggggtggctgccgggcagagacgctcctcacttcccagacggggtggctgccgggctgaggggctcctcacttctcagacagggcggccgggcagagacgctcctcacctcccagacggggtcgcagccgggcagaggcgctcctcacatcccagacggggcggcggggcagaggcgctccccacatcccagacgatgggcggccgggcagagacgctcctcacttcctagatgggatggcggccgggcagagacgctcctcacttcctagatgggatggcggccgggcagagacgctcctcacttcctagatgggatggcggccgcgcagagacactcctcactttccagactgggcagccaggcagaggggctcctcacatcccagacgaagggcggccaggcagagacgctcctcacttcccagacagggtggcggccgggcagaggctgcaatcttggcactttgggaggccaaggcaggcggctgggaggtggaggttgtagcgagctgagatcacgccactgcactccagcctgggcaccattgagcactgagtgaaccagactccgtctgcaatcccagcacctcgggaggccaaggctggcagatcactcgcggttaggagctggagaccagcccggccaacacagcgaaaccccgtctccaccaaaaaaacatgaaaaccagtcaggcgtggtggcacgcgcctgcaatcgcaagcactcggcaggctgaggcaggagaatcaggcagggaggttgcagtgagccgagatggcagcagtacagtccagctttggctcggcatcagagggagaccgtggaaagagggagagggagaccgtggggagagggagagggagaaaaatcaagactttttaagaaactttaattgttgattagttgtgtatttacattgtatgagaagcaatataatcttcaaaacacagtcatatgtaagattctttaacttttcacctggctcttttgtaatttattccacagttttattcattaggtgtctcttagtccatttccgaggttcgtttggcatcaaaaacaacttcctaaaaatgtttacaaaggaaagtttacaaaggaaattaagttaatcaaagcaggatacgaattctgtagggagtgtggtctcaccactgtcagctttgcccaggatggccagcgccagtggccgttaaaccagtgggcagagctctccatgcaccagcacagactgggggccacgctgcagcccgggaaggggctgtgcagggccagctgctcctctgagacgggcagacccagccccgctctggacagggacacgggggcctgagccagcctcgctctggacagggacacgggggcctgagcccatggaaacgcgtctgcggagtccccagtgctggctgctgtggggaggaggcgacactgggtcccagggtggaatttcagtgtcttcatctgagtcaagttttgcttgttatcttgacaaggatattacgtttgtaactatattaatagcatgtgtatgtgtggtaggtacacacacgtaattatgtatgcaggcatatatgtgtatatgtctgcttgtgtgtatttcacatgggaaaacggctggacacacacctgaaaataatcaccaagggtccttctcagggttgggattgtgagtgtaatttttgtgctttaaagttgtatgtgccctgtagtttccagtggatgatatattacttcattgacacaaagtatgtaaatatcattttttaaagtacacactgacacacacacttacacacacacacatacacagaacactcatttcagccttgcggagagtgacaaggcaagtaggatccagttaaaagaaacggccatcgttccaggcatggctgtcccaggacaaggggcctctttgaccactgccgtgttctcctctctctctgggatgaaagcccactttctggctgggccctagcttcaggaaggggaagcagaaggcagtgcccaccggccaggaagctccactggccaagaagctccgctggcttttgttgttaggttgtcagtgtgttccatcagttggtcagctctgaaagcagcctccgtgggtcattcattcattcattcgtgggccaggccctgttctgtcctgggcatggggatgctgcagggtcagccagcacaagtccctgtcctcagggaccaggttgtcccatcacctgcagggtcacctgtatcacctgcatgcagtcggtgaacggcacagcccaggtgaagtgtgtggctaatagagagcagccgagctccaaggctgcatgtgcctggagaggacgtggttctgaacatcaccttgttgtaagagtgtgagaggctcgagggtgacagcttcagatatcgtgaacagtcctgaagggacccagaccacatgaagccacatcaccctggaggagtgagaggggctggtggagctgagccctgctttggtggaaagtgtggatgacatgaaggtggttgaagactggctggagacgaaccacccaccgtgctctctgacatgctcttgcttgggatacacagcagggtttgcactcttagttaggatgttgcttgggaatgcatgctgaggcgggcaggcgcgtgctggggtgggcaggcgcgtgctggggtgggcaggcgcgtgctggggtgggcaggcgcgtgctggggtgggtaggcacgtgctgaagtgggcaggcgcgtgctggggtgggtaggcgcgtgctgaagtgggcaggcgcgtgctggggtgggcaggtgcctgactggagtgagcaggtgtatgctgaggtgggcaggtgcatgctggggtggaaaggtttgtgattgggtggacaggtgcgtgttggggtgggcaggtgcatgctgggaaggacaggtgcatggccagtgtggtcaggtgtgtggctgttgtggggcgcagcctcccctggctgaggcgtgggtcagtgtgcgtcgtcaggcttctctagctatggtcataggggcctctgggctccacagccactctcctgggtgggtagatgtgcttccctgtgtctgaccaggtcacctgccattctgcatcgaactgaacctcagaaaatctctcctcccaggatcgtcccctgcattcgtgaataggaggtgatgccaaaggcaggggtccattcctccaggaaagctgctgtgtggctgcgggcaagtcctgtgcctcagctgtgaaaggacagaaccagcccaggtcttaggctgtgtgcagaggcttgggacacaggtgcatgtggaggctgccagccttcacaaccatcagcgctccatgttgtcactgcccagaaacgcccacctgggatgcactggacacacctcaaagcagttgagtacagctgaggcccccagaggcatgtgtcttagagcatctgcagagtctagagccattcttgggccagagcagacgcctggcaatatttgagcaaatctaatgactgggcttatgccaaacgcacgctcagtcctttagggtccacccagagggatcatccctcccacccagggctgcgtggacaagacctctgcaccctcctcttcaggagtcagatctccttctcatcctatctcatgcaaatctgtttttgacacaaacttagctgctaacaaaacaaggttgattctcctacatgctctgaattacgtacgcagaaggaggctctgctccccaaacgggttgcttccacagaacctcaaatggtaacctgtacacacttcgcagatgtatctttgaataacttctatagtttaggggttataaagatacaaccacaagactattttcaaagcaccttaataatgccgagcttaacctattagtcttctgcccttttttctcatttaccaaaaaacattctaaaggatctctgcggaggcagataagtagtcttccaattccccagatggggaaaacgtggggcagagtttctcctgccctattcaaggttactgtgaaggagaagacaaactgtcctggaaagatctacagaagttggatgggccttccatggctttgtgcattgacatctgtgctttgctgaagggacgtcgatcaaaatgaagatatttgcagaatgcttaagaatataaatgcagcattcacctcgtagtaaaatgtggagctacatgggatttgtgatgggccaaaaatcaatagtgttaaatccatgtcagtaaaataacctaatcctttaaaaatacagtgctgtgcccatttgtgctacgtcacggtgccgggcctgggaaggacacatgtggagtgaattagaggctcgtcaccggtgggagccaatggcactgtgtgtcttgtggttctgctttatgaccctttactggagggaagcagagtggattaagggaacagggccccacacagctgattatttcaccagctaataagtctcccaggaccccagccaggcacaggagctccagccttcctgcaggtgctaagatctggctgcgctgttggctgttgcttcccctggaggctgctctcgcttccagatctctctattagagagggttcaaatgcatctgcaacccccgagccatcctcccttccaagttccagatctctattaaagagggctccatcgcacctgcaacccccgagtcaccatcctctccgagctccggatctctgtattagagagggatccaacatgtctgcaaccccgagtcattgtcccctccgagttccagatctctctattagagagggctccatcgcagctgcaatccctgagtcattgttccctctgagctcgcaggtgcccaggcacctcagagacacttccttccacttggggtgctctgatctataggctccgggtgggatgagtgtccagggtaggaccccgggagcctgccctgcacaaaactcaggaggccgagtacctgcaaggagcaaaggatgggtggcccaggtcgttatacacaccagtgtggccctgggcaggggctcgccaccccatacatgtcctggcccaggagccctcctgtctcagcaccagctggggcccgggcttgggggtctggggcagagctgtcaaaagcccaagtacccaggaacaaaggaactggatagtcagagctgggggaaataccacccccccactcccaggcagcaacacccacagtggacatggaggcagacaggcctggtgggtgaggccgagggaggaggttgtcctgtcctagtgaacccagggaggaccagggtaggggggagtgacatgcggagaaggtgtccccacaattcagagtgaacccttagatctccctacatctgtggcccccggagcagcggctcaccctcaaggcgtttctaacaggcccccaggctgctgtggctggtcttgaactcatggtgagaatcaacctcatactccaatagtagctcccaatcagtctaacactaaactgttcacggtcgtagcacccagaatgtatttgattggtaagtgaaatcaataacagcaacacccaagagacaggaaggagggcctgggacacgccacgtgaggccctgcaccacccgtgacactcgtgggggtttgaaagtggacttggattcttgtacatcgggttagtgtagattgcaaactctagggcaaccactaaaacattatgaaaagaagcacaattgatccgctacggagagaaacagagttttatagaatgctcatttaaaaccagggaaggcagaaaaagaagaaaatgaaaagaaacaaagaacaagtgcagggaagagaggggctgcgctgccccccacctggggaggggtctgctcagtggggcctggaggaagctgcctgcttcctggagctctggcctggctttcaagtgagcgaagggtctcagcggcttggagacaggaggagggtgggcctcaggcatccgaggcttggaggcaggaggagggtgggcctcagccatctgaggcttggaggcaggaggagggtgggcctcagccatctgaggcttggaggcaggaggagggtaggcctcagccatctgaggcttggaggcaggaggagggtgggcctcaggcatccgaggcttggaggcaggaggagggtgggcctcagccatctgaggcttggaggcaggaggaggggtgggcctccggcccaggagctggggcaggctgcttgcagcgaaggcctgggtgaagtgggcgggcagaggcagggctgcagctgcagcctctggaaaaggaagcagctccaccttctcctttggcttcctcagtctgtccccaccgtgtctcctggcccctccccaagcctgtctctgttcctgagttgtctattccatgcacagtggtggaaaagctgctgagcagggttctggactcctgcttttccggctgtgatacccgctcccaagggggcagctcctcggggatctgcaccagcggtcttccaccccggagctaaggatggaaacacccacaggtggctgcggccggctgagccttgggtgacgtggcgaccttcctttctctgaccttcgtctctgggtggcccagcagcccccatgggagccagaggccgcccctccccgtctttccttcttgtcttcccctgccttggagcgtggccctgctgccctccacttacaacagaaacgcccgcaaggcatctgttctcttcttatcaaacaaagagtgtttaataactataattaattcactttggtgctcctatgaatcagacatattagacagaagtcagtgaatgttagcagtaaaatgcctcgaagtgttcatcatcgaaggcaggtgacgccgggactcgcttgcacctcactcttggttctgctttcccccaagtcctgcgtgtatccattttcaaacatcagccgtggcaagtctgttacatgtgggtgcgcctgactgtttgaatatggattgtgtttgcagctcaggaggcagaggggtggacggggcggtcgttcccggcaggacctgtgggttcgtggatgtcactgagtctggaccctctgagtgggatgcgacctcactcttggcttgggtcccagaaggcctagtcctcagccaccctgggccacccgggttttgtttggctggcagttgctttatacctggttgttacattgaagaagtaggtgcttcgtggagatacctggactcccgcgtggaacacccagcaggggtggaggagcctctttgcccggtttccacagtcctggcagctccacctgggcagccttaccgggactcatggtcccgcagcctctggagtttgtgactttgctcaaggccagcactaatgagtcctccatccttttctgctctgaattgctactaagagcagattctaaaaaattctagtggctttaacaggatcattgccagaaagaagccatggatggagggaggcggcatggacaggaggcatggcgggggggggggagacacagtgccaggctcatgccaggtgggtgcggtagggcagcttcttgcatgttgcacctgctccccaagctccacctgggaagggccagaagggccatggctgtcaccgtcagccggtggttccgcccgtctgggagctgggaggccagcaccccccaggctctcaccaggccacctctgcagggccagctcagccagatgggaaagctggattttgcatcataagtcttgtgttttcagcttggagggtggaagtgagcacatcattctgcctcaacaacaggagggaaaatgtcgcaaaccaaaactaagtctctgttagaacaaggtggtgctctcagatagccctttaagtgggctttgctttctgacttttttttttttttttttttttaacactcatacatgtcagagttgggtctataaagaaactcttcttttttaatagctggaggaagggcctacagttgatgccatctgcgtcacgggcatgatctgacatgcgtcttcccaattaacccaggattaaaaagagggtcttaggaccatggatccttcgtgtttgtcacctttgcctttgtgtttgtcacctttgtggcaagttgttgcaaagacgtcacagccaccgcacacatttccactttgggtctggactgaccatctttgagtgtccgcccatcattcaccaaacactgacgcggctcgtatgacaggccaggtctctggcaggtgcggagggtgggtgcgccttctatggatccccatttaaatgacctcattcacttgatattgtgccgcggtcctgtaacatgcaactgttgtaggcactgggcaaagggtccacagggcctccctttgcaactccctgtgaacctcaaattcttccagggtacatgttttttaaaaggttaatttgtgaaaccccaggtgtgttggaatgtcacatcctatctgccttcccaagctgggtttctctgggatttacctccaagaagcagccttccatcccccaccacaggcacagacctcccctttgaaccccaactgacccccctaatctgccatggcctggtgtgtgatcgatgctggtagaccatgctttgagggaagttgtaaagacagagttcttccaaactggacctgcgctggactgcttggtgagagcgcgtgggaatggccgtggcagaggtaggccctgggcccctttctggagccatcgctggcttcctggagccgcacagcgcaacctctgtcagggcaagtgtagcaccaggttgtgctgtccaattaatgatgaaacaacctgtcctcaacgttctcagctccgtgcgcggcttcaccattccgagcttgggaggacgagggcggctgcccaaaggcacagggaagagaagcctgaatgagactcggactgaaagggacaggagctgggggctggggggcacaggacgagcacacagaggccccctgagtccccagctgtggctgtgtgcctggaggactggggcgtgaggaaaggacatctcgcagggcgtcaagtgcactcagtccccaggctgattagagagaggaacggacagtgtctgaggtgaagctgtgcccagctgctcgcgtggccaacacagggcggctcacctggactccggccagcaagactcgggatggcgagggtacctgtgcacgcaaatgggaggtaccgtttcctgcagcaccccagggaggctcacacagtgccctgccctcctatctccatgtccgcctacagggtagagccggtggtgcaggcccaggatcgggacacaggtccagcagaggactgttagcggtccctgactcagcacccatctctgtccactgagactctgcctgtccctcagggcctctcctcctcccctccccacaggcactggcacagcggcccggggtagaacccatggccctgactcacctccccctccaccatggtattgatgacaatgctgcccagcgcaggcagtgtcgacatgaagcaaaccattgttaaaatattgactggaggagaaatggaaatgaggctactgggcctgcagctccatgagtgtccacgcctccgtgtgtggactgatgaggtaaacgttctgtgacaaagcccctgtcccagaggagctttcatcgagggcttggcgcccacgacaaatgagtccacgcaggaaaggagtggcacccgcaggaggcctgtgctgcggagctcctgggagggtgacgctggggcaggggctgctgcggacaagcgttgggaggcctctctgaggaggcagtgtttgcgctgaaacctagaaaaagagctgcgtaaaagacaataattctgaaggctctgggtcgggggcatttcaggcgagggtcctagaaatgccaatgctggggatgccgccgagtgggtcagaggggccggaggaaggtgaacagggcagggggcagtggggctggattttatcccaagtgagtcgggagctgctgggacggcaggaccgggtgtgtgtgtccaagagaccatcttggctgcccaggggaagcggggactcgaggagagcagggagtgctgtcttcccggcgggagctggcggtactgaggaaggacgtgcagaaccaggcagggctgacagacgcggggtcgggggaagatcaggagctcccggtgtccaggctgcacaatgtgggcaccactgaacacggggtaaaccaatcaccagtcactcccacgctgggtcttccagctccctcgaggccgccctggccctccacactcccaccgctggcgccagcatctgtgcccgcggcagtttagagtgacactgtcctctgtccagcaccggtccacgttgaggtgtctgtgtgccaccgggacccttccgtagacatgcaccatgaagaccaggcctggtgacaggtgctgaggggtccaagggcattgtgtgggggctgaccgggcctcagtcagtgccagagaggacgccctgcatgtgtgatttccactgaccctgcaccgtgggccatcccagcctctccccagtggaaatgcctccctgcacagggtcacaccacttgcctctagaatccacccactgggagagcaagtccaaggcagaccctgggcctgtccgcccaccctcctggagctgtgctgtcacctgcctcttgacatccacatgccccaggcattgcaatggccccttgtttattcctgttgctagttttaagtcaaaagcaggatgggaaggataggggactcctgggcctgggagtggggtgggggcagaaaccacagctggggcatggggagagctggtccccactcctgtgtggctgaacaccgcggcctttgcagcattcttccttgaagatctccgaaaatgcagcagcctgcatcagccgggctgggagccgggcccaggagtctggttttaaagcagcatgcggaaagctgagaacccacaccgcatcaagagacccaggagcaggtcttgcccccaagaccctcacacgaacacttctactccctgagatgcttgtgttcagagatagagcctgggcagcccagagaagttctctcagccaagattcttccagtgacatctgtggacgttggctcagagcccaggcttccacctcaaacaccctgccccagttccttccttccaggggtctgcctgctgagaaatcagcagactcccaagaaatccataatctgttgctctaatgtggcgtcttggtgtccacaatttagaccaatcttttcaacacttatttggaagaggaaagcagcatgaactgaatgaagtttcttgaaattagcaacagtcatcatatctgaacaaagaggctgcccagaaaataagtttgacagttgaaattacttctaccaacccattcgtctgagattgagtaaatgaaaatctctagctgccaggatgtcaccacgtggggacgtcgctggcacgggtggctcctccctgagtcagaagggaggtgggacgagttgagaaggacaatccagccggatccgggtgccgcagcctgaagggcccgtgtctgttgagctgatagtggcgtcttggtcacacatcacagacgggaaggcgagcaccatgctggtgggctgggggcggccttggcctccagacccaggaagctgccaccagggctcccgcccttcaattcggcagctgtttctgctgttctctggcttggccagggtgcttaatgctcactcgtgaaatggcatacccaacaatttgacctttcatcagttaagcgatgctaaaaacaaaagcagcctggatgtgcaactgtgggttgaggggaggctgcccgcaaagaccagggtagtttctcatcaagggtttgcctttgaatttgcagagtgccttctttccctgggttctcccttttcggagagccgaggtccccgtcagatctcctagtgggtgataaattccccccatgaagctcacgtcccaggcggaggggcctggagcatccaccagcagcgctttgtgatgatggatgcgaacgagtgctcccggcaggctcatgtttattcatttttgatgaggtgtgcacgcagccaagggcagctgagctgtcttacaatacacgggggtcacctaacatcggatttatctccgacctttgagtgtctacaggcaggctggtggctgctgcatgcacagcgtacacggtcctccagcaaaccacagctgcattctctggaccctgggaatctgccaagcgatattggctgtcaggaagcccaggaaaatcgcagcggtgggaccgaggggcacctgcggctacatattaaggtcacgcgttggaaggttggttcctgcagttctgggcggggtccaggtgggagaatggctggggactccaaacgctgaccctggccatcccataccatccagccagccccacccaaatggacgttggggcccaaatcccacttgtgttttccaaaacggcagacagaaactgcaagccccatcttaatcctggcttgcaagtaaggccatggcctcctgccctcatcgtcaggctattcttgattttccctgccaaaaagtggggtggctgttgccacactttgtccaacagcagtcatgcctccccacaagagatggctgcacagatgagagccacggtgcctggagctggggagtcggccctgtagacgaacttgaaattcacctgaagaaaagctgctaagtgaacaccagctgctgccggcacagccagggccactgcgtccctgcagcccgaagaaatccacttctgcccttggtgctggagccaatcccactggcagtgcacaggcatcaatgctatgacttccatgaaaacagccatgggctcaggcggacagactccctacagagggaggatgatggcatggctgatgctggccgaggtccactgaattcagagtccacatggaggacggagctgaggcctagggctcacagaggccacatccgcagaactgttgcttccggagggccagcccaggcaggactagggactccaggagggatcccatccccctgcagagccctgagaaccccctccgccccagatcgccactctccacacacagctcctggctgaccagatcttaccctcgatggggtgttgggaatctgccggccacagtggcaggaagctgctcacagctcactgtcaggaaagggtgaaagaggcatgaatccgaagacagcagagtctgggcccagcttccgcttcccctgggagtgtggttacacttgccagggtgggggtgctgtcttgagcaaagcctggagaagggtgagaagcatccctcacccgcacacccggtcagtctgtatgtccagacgactgctccctggcagcccacgcagtgctggcaccacagtctgtatggaccgtgccctttgggcatgacgccaccatctcataagctgcacccagggtccctgtggatgtgcttgatcagagaaaattgggacaatgtgatggaggcaaagaaggggccggtcaagccagcacctggagccacagtggtgtgggaggcagggagcatggggccaccccaccctcaggaaggctgagagggtcttgggcaaccaggtatgtggagaaacagtcggccgggatggccctgctcacggagccctcgatgcacatcccgcccaccctggggctccgcatgcagcatttctatgcacaccatcctcaccattctgtgagccagggaccaccatgagccctcttgacagatgaggaaaccggggaacagagaagcggggttgcatgtcaaaggtcacagagccagaaagtgacttgggactcaaaggcggatctttccgctttcaaacctgtttccagagagggtggccggcaccagatgctggcataatgcgcccagacggccccactgcaccagctgcacatgtgagcatacacgtgtgcccccacacacaccctgggaggtgatggcccaggactgggtagggcctgggctttgtgtgtggcacacacacacacacctgcacacgtgcatgcacactcatgccctgggaggcaatggaaggggtcgggctggactcgggtctttatgtgccctatatcctgctctcagcccactgaccttgctgctgggtcctcggtgagtttcctggacaagcaggccaggaagagtgaatgaatgcaagggcagaggagcaaggaactcgttctgaacaggaaatgcacgtcttaaaagcaagactgcaaggcggagggaccccaccaagtctgaggctgccaaatgtcgcatgtggctgtcaggagggcagccagggagatgatcattgcagacattagagtaagtgctcttgagaggctggaagcactttgttgcccaaggcttctaagaccagagagatgctaagtgcttctatattgaaaagagtgagcattcctaatttgttaggtccctgctatcttttaaattctccaaccctaagagaagaaaagccctattctcctccagaggtcaggttgggtatcatcccagggaagccgagcttttatgctgtgtgcgcccatgtgttagtgtgtatttatctagcgggaggagctggaagctgtaggtgcaaatgggtgtgtgcatgtgggtggatgtttatccctctattgacagacagacacgcacatgcatgtgcaggcagggggaatttagcccaggctgccccgaagccgcagaggatgcacctgcctggaaaaggaagcacaaaaccctctgcacatgaccctgagaacacacggtgaatccagattttagaagccaaagcagtgccctgtggaaccagctgcccctgctggaggctgtcgtggggcgtgctcaccactggggcccatgtgcatgctgtggagtctgatggtgctgggttgtccaggctgccagcacctgctggccactgctgtccagggcaactcctcctgtgtacattcccccagccccatgagagaaaaagagactggggtcagagaggtgaaatggcacacccaaggttaagcagcctgggagcttcactgctgtaggatcaaagcccaggtcttcagagaaggttgcactgcatgtctgcactccagggggatgctggttccaggcccctgggccctccacttaccgcttcttgcttcccactgctgagtgctattgcagaatcatccagggagaaaggaaaggatgcaaggaaaacgtacttaggatccaccagcaggcccgggtgccttccaccagcacccgcctgttctcatcagagcaccgtccgccagcccctctctccagtctgtccttgggacaaccctgggaagccagtgggacaggtgttccaggaggacccctgtccagcgaagctcagggctgcggcaggccggcggcaggtcaggtccttccttcaccctcggggatggtgcctgccatagccctgggcctcctggaacccacgttctccagcagtaagttaaggagcgggcatgggcacacctcggggcaataattccctgtgaagggcattcagagcactatgggatggagaggacaggcttccccaaagacatgtgactgtgggcctggagagttaaagggagccagtcccgtggaggatgcagcaccggcaccccacacagcgagcaccacaagtgccaaggcaagcctgggccagggcaaagcctagcaggtccaccatctggtgaccggcgggatgggaatgggagcctggaggagggcccaggccacagagggccttggagggagaatgcacccaggagggaacttagggtttattctcacatcactgggagcctctgagggtttcagcaggagtggaggctgtcgatttaattggaacttaggtggcctatgcctcagcccctgttttcaagcccagaggaagtaaagaatggaaggaaaactgaagaagggtggctcaaatcccatcagaaacttatccggtgtgtaatgttcctggagaagagaagctctttcctgaaagtcaaatctaccactgagccagagtgatctttttctttaaatgctcttccttttgctggcaaaagagggtcctccctctcaatcttcccgtaccctccgctacaaaagactttaatgaaaataacttctgacagctgtatttttgagagactgatccaggatgggatgtgacatttcagtataaataaattgtataaatctatgcaggacacggctctgggagcaaatagaagagcgggttctgctcccatgaggtcactggtggacctgagctccaagcatgggaggcagcctgagacagtgtggaccctcgagctgtgtggatcggccaggctgcagcattaataccctttctagcaggagctgatctaatgagtatgaggaatgcatgacccccaaaggtggtgctgacaggaggcagatgctggccagggcatttccaattgcaggcaataaaaccatagctccgagtagctggacagcatggctgccacatgacatgcagggaaatatggatttcaggaatggctagactcaggtgctctgcaacaccaccaacaagctctcgctgcttccctttgagttgactctgtgctcaggcaggtcctcacccccatgctggtccccaacagcttctgacttctgtccttaaagttcagtaggaagagaaaaactgttttcttcccccatagttccaggaaaatattgggagtgactgtcattgtcccagcctcagtcatatatccacctctgacctggtcatggggtctaggccatggcctctgtgcactggccagaccagcatcacgtgtcccctgatggagccaagggtgaagtcagcccattcaccaaatggaccaagataacaaaggagtggttccctaccgaatactggaggtaccattgccaaaagaggagggaaacatccaaagctttgtccagcactctaggaggatgctggaaaaagtgcaaagcacttgtttttgtatggggagtgcgaggctgatgaggctgttcaggaaaagcaaaatcaaagtggtttgtgaggattcccatgacttctgtggccattcttatgggtggggcccagggtgtcaacgaggatgagggaaagggatggaaatgtggggaagtctggggcactgttctcctgttgatacgggatagaaaggaaggaaggggctgggatcagtggagtgaggggttccaaacaggttttgctgcatctcagctccaaggccttctccacaaaaggaagggcccctaggaggtaagactgaggaaaacagactcagccctaaaaaacctgtgagtgtccaggtataaactctggtccctgcccttagtgaattacatgtacatatcaaatccggctgcacagttaacagtcgagtgtgtatggcataagggtgaatggataggtagatggagggatgggtagatgggtggatggatgatgaataggtggatgggtggatgcatgatggttgggtggatgggtgggtggatccgtggatgaatggatggatcattggatggatggataaagaataagtggaccaggtgcagtggctcatgcttgtaatcccaacaccttgggaggccaaggcaggaggatggcttaaggccaggagtttgaaatcagcctgtgcagcatagaaagatcctgtctctacaaaaattaattttaaaaattagctgggcacagtggcacacacctgtagtcctagctacttgggaagctgaggcaggaggattgcttgagcccagaagttcaaggttgcagtgagctgtgatcgtgtcactgcactccagcgtgggcaacagagtgagacctggtctctagaaaaaaaagaataagtggatggatagatggacaaatggatggatggatgatgaataatagacggatgataggtttgtggatggatgatgaacgggtggatggatggatgggtagatggatggatgggtgtgtagatgagtggatagatgggtgaatggatggataatggatggatggtggatggatgggtgggtgggtggatagatggtagatggataaatgaatggatgggtggatggatgatgaatgaatgatgggtgggtgtgtggatggatgatggatcaatggatcgatggatagatgatggatgggtaggtggctgggtggattggatggatgcatgggtggaaggtggatggatgaatggatggatggatggtggatggacagatggaggatggatggatggatgagtaggtggatgcaggatggatggatgatagatggtggatggatgtatggttgaataagcgggtagatagatggatgaatagatgggtggttggatgtatggatgtatggacagatgggtggatgggtggatagatagataaatagatggatggatgagtggattggtgggtgggtgggtgggtaggtggttggatgagtgtatgggcaggtgaaaggatggatgaatgatcatatgggtggatgggttgatggatagatgaatgggtgggtatatggataatggatggatgatggatggatagatgggtgtatgaatgcatggatgatcgtatcggtagatgggtgggtgggtggataaacagatgaacgggtgagtggatggatgggtgtgtggatggacagaatattcctccaaaagcatatcaggtgctctgtacgtggtaggattgtgtgccaggtgctgtccctgtcctggagattccaagacgaattatgcaaagcccagtccatcaaggagccctccgcaaagtcagacacacagacttcaatcaggtgtgtatgtgttgcacaagagggtaggccctgtccgtgaagtgtgttcacagcttccacctccagcactgtgcttgctgtgtagtaagggctctgtgagaaatgaggtgtgattccaatgagtgaaactgcccatagtcaggacaacacctgagaccacgggaggggcagcaagtctgagccgagtctctggggtggacagtgaggcatctgccaagggtgggagttggtgctgagcatccctcagggtcactggcagagactggaatcttcactgggaggggtgggagaagattatggagcatccctgggaacccgacggggctcaaggactggggccctgtgtccctgctcagctgggaactgcaacctgacagggatcaagaagggaatgggtgaggcgcaggcctgaggggaggggaagaggtggggagaggaggaggtcatcctgagttatccagtgggtcctaaatgccatcactagtgtccatagaagaagaagaaggaggcaggagagtgacagagaaagaaagagacgcagagagaaagacaaagatagcatcagagagagagattggaagatgctgtgcttgaggatgaaggcaggaccaggagtggggatgcagacggcctctagaaactggaaagacaaggaagggctttctggcctggagcccccagagagaacgcagccctgcccacaccttgacttcagctgcccctcctgcacagtgacctctagagcgctgagatgtttttggccaccagacttgtggttatcatcagagcagccctaggaggctcaggacttcggagcccctgaatctcagcggcagctgcagcatgagtccatcctggaaggaatccaaggacagctcagggccagcacctgcttccggggcaatctttttgtgcctccttttaaaggcccacgtgaagggcatggtgcttatcaccgtggggcacacagggaggctgcgtgcctgggccctgcccttctgctcctagcaagcaaggaggcagttgaggagcctggcggttttcaccttagatgaaatgtcaggtctgatattccgtgggagcagctacatctttgttaaggtctcattatctcaagaacacgtgtccagggcccagaaggccgcccgttcttgaatatttatccatccttcctgggtgaccagcctggcaggctggggagggtctggcggttgagtgcagagttcattagtctgattcagcatgtctcaggttcatggtgctttcaagagacatcatgaaataaattcaaaatgggttatggagatgcccacagagcaaataacacgcgcaaattacctcgctgctaagggggaaataaaaatcacatctctcttctagacaatatgacaaaatgagacagaagtcagggaaaatgtccttcaggaaatcaaagtccttgcatttgcatcctgtgacgatctcctccaaattggcacccattgaaagattacatttttcagtcttaacatatatcttaagagaaacaaatggaagtcctcaaaagaaggcctgatcgggaacaaacctgtttttcacatgacttgaaagggctgcctggttttgggggtgtgcaaatgagaccttattccctagctttcttctgcagcccagaatctgttcagcaaatactccccaagcctgcctggccaggcaccgagcccagcacagcacacgcaaggaagagccaagactagtggagccccaagcctgagctgccccgagtcccgtggggcggagagacacagggtgacaagggcgaggtggaggagaggtggagggaggggtgccgagcttggagcaggagtcacagcatgttgtgtcgtgctggtcacagggcgtccagaccagggcccttgtggaagcagcatcaggctaaggagggtgggcattaactagaaggctgggagtgacaggcagcaggcctttcgtgcagacaatgggaaggacacatgacagttcacagggagcaggagaagccggctgctcaagagaccctgggcccagtgctcagcagggcccaccacttggggccacctccaccagcacagtcccatagaaatggcataagagcgcttctgtattcttaaattttcaggagccacattcaaaaaagtaaaacaggcaacatccttgttaatgctatattttatttaacccaatatatccaaaatgttctttcaacatccagtccatatgaaaaattgttcatgcgaaatctgacattcattttggggagtgaggactgcaaagccttatgtgtatttcatgctgattgactgctcagcccagttagaaccagcacagccctagaacctagactgtggtcgtcagcaacctacagtcctcaagccaagtctggccccctgcctattttgtaaataaagttttattggcacacagccatacctattcctgtacgtattgtctgtggctgcctttgcctctgctgtggaccaggtgagcaattagaaagagacattgtggcccacccacccacaatatgtactgcctgatccattacagaaaatgcttgctgccttctgctctagacagagatagaatggggtcttcattctagcagtgcaggaaggggctaggtctgagcgacgtgtgacaggctgctgttttttggcagaaatccctgcagctggtagatgtggcatgaggttgggtggaggacagctcagggacagggttagacggtgttgtgcccacctctgctttggggagaaggaaacaaccatcgtaggggctgaggctttgggctcagccaagcactcccatggaaacaaccatcgtaggggctgaggctttgggctcagccaagcactgccgtggaaacaaccatcgtaggggctgaggctttgggctcagccaagcactcccgtggaaacaaccatcgtaggggctgaggctttgggctcagccaagcactcccgtggaaacaaccatcgcaggggctgaggctttgggctcagccaagcactcccgtggaaacaaccatcgtaggggctgaggctttgggctcagccaagcactcccgtggaaacaaccatcgtaggggctgaggctttgggctcagccaagcactcccgtggaaacaaccatcgtaggggctgaggctttgggctcagccaagcactcccgtggaaacaaccatcgtaggggctgaggctttgggctcagccaagcactcccgtggaaacaaccatcgtagggctgaggctttgggctcagccaagcactcccgtggaaacaaccatcgcaggggctgaggctttgggctcagccaagcactcccgtggaaacaaccatcgcaggggctgaggctttgggctcagccaagcactcccgtgctttcagagtttgaggccagggtgcccctcactgtgctttccaaaaggcccacctgcactgtggagggttgctctacctggaggcccactgcacactcagcccagctctcccctcctcctgcccagagcacaggctcaggctcctggcactgcctgcttaggaccctcagacggcctcaggatgtcacagataatgtaattgggcagtcggtggggggagcctcagcgaggaccgagtgtggggtccaaggtctgagacttaattccaggttctctgaatggggcctgccagttcgaatttgcacgtgcagaaaatcacatccttccgtcattcccattaacattcgcctggtgtcaggaacggtcaggaacggtgggctgtaattgactcaagtctatttgccagccacaaagacaatctttataaaactcaggttaggaaatgaatagtgcgattgaatactgcggcccccagaggaggtgggattgcattagcaccttctttccattccaatttggatcttccaaggcatccatctttacctgaaaaagaaggtggatgggggagggatggtgtgaacaatggaggcccggggctccctcctcctgggtctacccctttaggagcagggtggagggggacagacaaaagggaggtgagaaaactccttgtctgcagggatgggtctgcttggagaccccgggtcaggctgtgacagtgccctggctctgtgcacccagccagggttcactgagtgtacctggcattctctcaattctctgcacatgccctcaacaaacaaactcaatcccacacacccccaggagcctatggaagtgaccagatgataaaccttgatgtaatacaaatgtaaatgatgctgcatttcagaaggtggtgtttgctgcgagaaagggaaagtgggatcaggatgaggcttggagtggaagggggttgctgttgtccaaggggaggtcaggggaggcctggctgggtggcctttgccaggggaggcctgactgggtggcctctgctggaggacctgatggggtgaggtggtgggccaggctgcagtgggaccagcggtccaagaccttggggcaggaggggctgtggtgtggccccagcagagcagaccaggagggtgctgaggaccagacagagagaggacaggtgcagtaggtccttcgtagggccttgtcacctgtcatgaggaccataccttttactccgcatgcggtagggagccttggagttgaggacccctggggtgtgcagtatacgcaggaagaatgactgctgggactccccagggtggagctggctggagtaggggaaggagcagggccctggcctctgtgatatctgcgagcagggcagactcctggttcagattcaagtacaggaaaagggcatttaacttacttaagatgacagcctgtatgcaatgcacgagcagcgccatttgcaggcagcaaacgtgctcaaccctcagcaccaggcacacagagaaagcggcctcccttctgtgggagggccttccctccagactcctgcctcacagcatgcagttcacttttactttttgttaatgtgttatagttggtgtcaatgtatagacctgacgataatacaactgtcttttttaaacaaaaaaacacagcactttacactttagatttttttactcattcagactacctccttctgcagcaggcacatccccctcagatccaagttaagagaggttagtgggatgcattctaatgacaaaaggataagtgggtaggtaggtgggtgggtgggtgggtggacagacggacggacggacagacggacggatggatggatgatagaagataggcaggtaggcaggtggatgggtggataggtggatggatggttagatagatgatgaatggatagatacatggatgatggatggaagatagatggatagtggatggaggacagatgataggctagatagataatagatggatagatgatggatagatgatggatgatggatgataaatgataggtgatagatacattagatagatgatggatgtttggaggaatggatgatagataataaattatagatagatggatagatgatacatagatggatgacagaagatagataatagatggataaataggtagatagatggatgatggatggatgatagatgctgcatgcatacacacataacatatattttggatggatgatagatgatacattagaagacggatggaagatagaaggataggtagatagatggatgatggatgatggatggatgatacatagatagatgcatgcatgcatccacacatacacagatgacagatacatagattatggatggatagatagatggatgatagatgatagatgagatagatacatgatggatggatgggtggatggatggacggatggatggatggatggtaaatataaacgtagatcagtatagacatgggtatatagaagtagcttcataattttctgaagatggtaactgggtaattggttcagaatcttcagaaggagagtaagtagacaggaaagctatcaacaaggtcacagacattaataatgcgaaagtgtggtgggcgcaatgacaccaggtagccaggaaagtaagcatctcagcaacgcagtttctgggtgcccgtgtcagtttcctgcactgcagtaacaagtgccaccaactgggcaccttaaaatgacagaaacatcttctctcctcgtcctggaggccgggagtctgaaatccaggtgtgggcagggctagctcccccaggaggctcctctgggagtccgcagcagccccactcagctctggggctccagctgccctggcgtccagtggcttgaggaagcctcaccccatccctgcctccagcctcccatagccatcttctccctgtatgtccttttctgtttcttatgaggatgctctcattggatccagcatgagctccaactctccttgcctctaattacactggcagataaggtcccattctcaggttctaggaggacatgaatttgggggacactattcatccctgcagtgtccaagagggagagtatgaaaatgactcaggttttctttttgccctgtggatttcacacgtgtctctgaaggttgcctagggttccggttggatctgtcttgttcctgccgcacccagagcccggaagagcgaacagcacacacggtgacaagggtcagaaatgctaccaggttgggtgggtcagtggctgcgtggcatggcctggtgtttgcagttcacactcagcgtccaccttccatctctgtctcctcatggccttcctttcctccataaaacacatccctgtgtcctcgtctctcttactctattttccagcttttttgcagcatagtatagaacagaggttctaaatttgagtgcttgtcagggcccctggagggcttttgtcaaaacacaagttgctgggccaggcctggaggtgaggggtgggtcccaggtatttgcactttcatcaagttcctggggatctcgctgctgtggcccagcaccccacgttgaggaccactggtccaagaaaacacagaaggctcctctagattccgaaagaatggcactccagttccagctccaccaacgccagtgcacacccaggaagccactagctgctggggatgtcagggtcctctcctgacatctgaggttaacagcagcacccatcaagatctgcggggcaggtgagcagctgcgtggggagcaggggcctccccatcatcttccgccactggtggtgctgtgagcacgccaaggcccaggagggagcctgtggcccctgtgtgtagctcccgacttaggaaggacgttctggtttcagcagcccgctggcctgcagcagaaacctggaccacatgctaattccacctggagcagaccccggagctttgctttagctctcagggcccccatctgggtggacttccaaggctcttcaccaggttctcatgagagagccattttgtctgtcagtgggaactgcccagggcctcgggtagcctgagagtccccaagaggagaccctcgtacccgagtgaagcttgcagcccccaggaagctgaggagcctgtccacagcctggggcacccggcggagaggaaaggggaagcaggaagccatggaggaccctgccccagggctgcaccctgcatcctgaagcgaggaacagacgccatctttaagcaccccaggacccagcaccacctccccaggaccaggggctccaccatagcccagtcaccaccccctgcccctgtcctccacaggagccctgcagccctggctctgtgtcaggatccagaccataaggagggacagggtgccaggctgggactaagacggggaagaagctgctgtgggacccgcactagggctgaggggcgctgggctgggcaaggcccaaatggcctgatggaggtggctcctgcctccgtgaccttgccccaaggtccctggccagggcctccattcagggtgaaatgtgatgggaggctgtggggagagtgagaaacaagacggtcactcagggccactgtgacagaacagtcaaggggacaatgcatgatgggcaggggctctaaaaatgggaaggaagggcagaaatgaggagtgggggaagggcggggagaaacacaaagagccgagcatcccccgaggatagaagggcgccctggtgtcctttctaaagaaatggttccctgtggattttcagagcttcggtagtcatggttcagcaagttcgatgctttcctggctgtttctgggatcgtggtagttggagcgttgactctgtagagaattccgtctccccgggatgcaggacctcggacagcctcagccagtgccctggaacctcagctctgtcctgagttcccccctgtgtcttcttctcatccagcgtccttcagagggactggatggaagccaggggtggccgcctgtctccaggatgcaccatttcttccctagagacacagcaggtggctcagaggctagctctctgggcagtgagggcagagttagaattcctatttgttccctccctttccacccatttctttgggaagacaaataggtgacattccagaaagaaacatgtagcttctctaacataatccctctgtgccgtgcaattattaacacatcgcttgagggcattgtggatgtgggccctccagaattcaagaaaatgtctctgcaagggtaaaacacccgccctcacgtcctaatggctttttttctctttcagccacacacagtcaaatttgaggcataatttgctgtgaattacctacaaattgtatacagtgctttaggactaagtagctttttgcaaggcttggtatgaattttctcttttgtccaaatcatacaaaatactctttctaaattgttaagattttctgccacgcataaaaatgaggctgaaatcacccaaaaggtgacaaaaatggattagacaatccttggaactttataactgtgtgcgtatttcaagggatctgttggcttctgagctcttgttctgaggggtgggagaattagacaatccttggaacttgataactgtgtgcattttaaggaatctgttagctcccgaactcttgttccaaggggtaggagaaaaagggggcatcatctagcagctgggaggagtctcaggatccccctgcaggaagcccggaatcccttccacaggcacagagctgagggtgctgcagagcccctaaagagctttctgggcatcgggaaagtccgggctcagtgcatgtggagctgccaccctagaaagccctgcgtcggtgttgctgtgttctcaggcccgtgcagctgacattcctttggcttcctggtgatggagggacagacagagcatccccacatttgtctttgagggtgtgtggtgtatacgggagcaagcaggttcagcagaaaatgacgtgatgccaaggccagggctgtgaacttgcaggagctgcctgtgaccccagggcaatctgggttgtcattgcagaaggaagcccagtgggtttcagctgctagtggagaacctatggcttcagtgctagcagttgctgtatcctgctaagcgtctgcctccattctgggtcctggcttctgggccagtccctgcctttatgacactaccttcatggggtgtgggaaggtggaccaaggaatgggtggatagagggtagatggatggacaggtggatgggtagatgatggatggagggatggatggacaagtggacagatggatagagaaatggatggatggatggttggacaagtggacggatggatagaggaacagatggatggatggacaggtggatgaatggacaaagggacagatggaaggagagagggagggagggaggaagggagagatagatgaatggatggatggatggatggtggatggatgatggatggatagatggatggacagagggacagatggaaggatggatggatggaggggtgggagaaggggagggagggagggatggatggatggacagatggatggatggatggacggagagatggacacacaggtggatggatggatgaatacatggataggtggagggatggatggacagaggaagggagagatgaagggacagagggagagatgggtggaaaagtggaagggaggagaggagagaacagggcattaaaactcattaatgataaagcaattactggaggaagcatggattttacctccccatgccaggaatgattttacctccccacgccaggaatgtctgatgtttctggcttagtgaagaggaagcttgggaagtccaaggtgattctaatctgtggaatgttgtattactctcacatttgtaggtttatggcatttgttatggaaacgttcttattgtggggcaatctacccgtaagcaaatcccctgaaggtagagatcagctgctcacccatctagtatttccttttatttgtgaaaatgcattcagtgagaaaatgtataagaaccaattgtgaatggttctctttcagctagttctcaaaaaatcctgtatctttttataaagatggaaatgacagcccagagtctattaaaataaatataaagtcaccatgccggggcctggcaatgggactggctgcttatggctttgattcaacattttctccctggaatgtgtttatgggagtttataggctgtgtgtgaatgtgcagagtacggagaagtgcacgcagctgtactctccacgtctgtgcagtatagggcagacgataagtcttgagatccatatgtttcttataaaattctgatctttggaaggatgagtaataggcattaagatggcagagaaagaaacgatcacaagaggaaatcatgcacttcagaggcagtttctgcttcacaaagaaagtctccagcaaaatctactgtaccctgcagtgaacggcacgggttgctttccttggagctgtcacggtgtatctggtgtcccccgaaccgcgagtcgtggaggcccgtgggcaggtgccccgggagtgcggcccaggcagatggtaccagaacggggtgccgtgctagaagagcaccccaaactgcacgcatctgcttcctcagatcccgcagatgggccaggtgttcagaaccttgttggtagcttgtcagtcacccacagagtgagatgcatactttgttgatagaatgagatttaatgttcaggtcaaatatgaaaatgtgtttgcttggaggggcatgatctttctgtagaagactcttcctgtcatacagttaccactcactgtcctcttccttcaagccaggctctgtgctaagtaaacgatcctgattaaaaccctgttttcattgtctgttcttgtacaagcctgtgcctgcctgccgtggggtgaggtgcaccgcctagctggcacttcacagtagagagcagccagagggatgggtgggagttgggaggctgggctcttcctggcggtgggtgagactgtagccccatcacaaccacatcatccccttcccaggagctcctcgtgtctggggaggtgggcgtggcagggactacagccagagctgggtctgtttggtgcttcttccctgtgtgtggattcatttaacagggttggctgatacctactgtgtagcagggattgcagtggcatcggacaaagcctctgccctctggatgccaaacattctagaaacccccaaaggaataaatgcagccgttgctgctggtgaaggaggccgtcggagtgctgtgaatgagggggactggccggcctgggaagtggcctgggaggtgctcagagggtggcaaaggggcgaccatgcgactgagccctgtgggaagagcaggggggccgcccagctaaggaagcagcaagcgcggagcacgtggcctcaacctccgtcttgcttatgctggttaagtaggtctgatgttaaccaagccaaaatgcaggggcagggacatctcaggaccttttatacaaaatagccttgagcctgggcagaattcggaggcaaccatctcctggccgcctgttccatatcacacacaaggtccagccccctgtgttgttctgcagctgggaatcctgggctccgtcctgggggctgaaaggctcctgggggttcagtctctaacctgctctttaaaattttagggctttcttgggtagtttcattttatctcaaagtcttacaaaccatcttagcgtttttgtgcaaacagctcccaatcctcgccagcacctgggacctgccacacccacccagcacagcagcctccctcaatctgcagcccacagccgcctgccgtgaccacccctcgatgtgggtgaggtttctaaactgctcctgaagcttcaaacacacaattcatctgtaaatatttgctcactctatttctaaccacgttattaagatataaaaacttaccgtgaaattcccctgtttaaagtgtacaattcaatggtccttagtcaattcagagttccatgtatagtgtagagttgagtatatgttacagagagcaactgttgctgtcatctaattgtgcaacttactcatcacccagcagggaaaccccgtacccataagacagccactcccattccctgccccatcccaacagccacaaatacaccttctgtctttccgtctctagatgtgtctagtctgggtatttgctacaggtgggattgtctttggggtggacttctttcacttagcacagtgtttttaagggtctcccatgcggtttgggtctgttcctgggaatatattgtgttgcctcactctccatgcgctgctactggcttcaaagccgcctccactcaattcatgtctcaaagcaacttggtctctccaccaccctttgtgtgaagcggggtgactgcccctccccacaggctcatgacaggggttgagcaagtgctctgtgtaccaagccattcttgctgtacctgcctcataataaaagcttgggccccttcatctcccctgcggagagtgcctgctctcatcagtcccgtctctcccctctggattgcaaaggccgctcctcggccccaccaccccgctgtttgtggcgctttctgtcagtgtcctgattcggtcctagtgaccaccaccttatcccagcctggtcactcagcctctgtgtctcgggctttgactacgtcacccacacccctttgcacagagtgagactgtcctcagaccccttcccgctgtccggactcagagcatccgaggcacctgccctgggagagctcctggactccagtcctcacggggctacccctcgtcccatgtgcaccctcagccccctgcagaaacctggaacacacttgattcaaaaccttcacattaatctcaggtgggatagtccgggctgtgggatccccactgggtggtacccgcacaccatttagcattccagatggcggagttctggaagggaaagctcttctttccaaacccctctcctgcctttcatcagagaaaattgtgcagttcttgaagatctcaataaatactgaaggcaaaaataatgtcaatgttagcaccatcagaggtgatgggatttttttttcttccagtgaaaatagaccagcggcatctgtaccgatgattttatagacttttctgccaagagaatgaggatcttgccagcttttcctaaaagaatcagaagtttcacgaaactcctagagttctacaaactgtttgctaatctgatgacagttggtttccttgcagagctctctgctaagcactagccagtctccacatctgcgtggctgggaggcctgcctgtgagtgccagtaatggaaagactggagagaacaagcccaactgtgcgtgtatatgtgtgtatgtgcgtgtgcattcgcatgtgtgtatatgtgtgtgtgcattcacgtgtgtatgtgcctgtacatttgcgtgtgtatgtgcgtgtgcgtgtgcattcgtgtgtgtgcatttgcgtgtatatgtgcgtgtgtgtgcattcgcgtgtgtgtatatgtgtgtgcattcgtgtgtgcatttgtgtatgtgtgcattcgcgtgtatgtgcatgtgcattcgcgtgtgtgcattcatgtgtgtgcatgagcacgtgtgtgcatgtgtgtatctgagtgcacattctcgtgtgcattcgcgtgtgtgcattcgcgtgtatgtgcgtgtgcatttgtgtgtgcatgtgtgtatgtgcgtgtgcattcccgtgtgtgtgccttcgtgcgtgtgtgtgcatatgtgtatatgtgcgtgtgcattcgcgcgtgtgtgtgtgcatgtgtgcatgtccacttgcatgcatgtgtggtcatgtgtgcagggtttgttaggttttgtgctagggattgtgcatgtacaggacggagagtgattaacttgctatcagatcctctcgagtcaggttaaagcttcccctccaaaccaacccccgccccccgacccagcaactctgctcccccgactagcaaggtgttttttcatcgtgatcatcacccctgtgttcagcttgggcggtgcccttgctggaagtctctgctccgaagatttccaaggacggtggcaggtgattgattaggcgacctccccgcacgccctggccagtccctcagacttcactggcaacactgaagtgcgtgttcggtgtccactgaagcaaccacaccctttccagaaagctgcagaggtgccctcctctcccgctccacagcctattgtcccgtttttatttctgacaccagacatcatccactggactgagctggacagtgtctgctcttcccctttccctgttgggataacttgttcaggggagtttcttacacaacctcgtctcccttgtcagtgaccgtctgtactcggaggcagcgctgtgccgggaggaatgaaggtgtgtgaaatggacccaaaatgtggatgggcgcccccggggacccacagacactgcctcctcagccacagcctgggcgggacttgctgactcaggcaggagtttaatcagtaactttattttaattccataaaacgacccaagagttaatttaggagtagttttaagcacaaagaggaaatttatctaaaaatagatttgacaaaatgtaaaacaggctagggtttcctctctgctaaacaaatgcgtgtaagttttttaaattcccaagtaaatgattcggaaattccttctgccttaagtctgatcaaagggaagtcttgacagattgcatttatcacagggagcaccacctgatgaagcaaaaatttattttaaaaaaccagaaatgtggtccgcggactacaattacaatgtgtctagggcatagaaaatatttccactaaaaggacttagcctaccttagaccacaggggagcctgggggcttttgggtttgggttttttagtattcaggtcctttctcagcaggaaatgaagtcacattccttaagcacaagcattaaccttgtactaacttagatattattatgacttcataataagtcgtaagtgcaggagtctcgggtacagatgagcaaccctaggctggaggaagctggcccagtggggtggacaggatcacaggaccccgccgacagcccaggtctcccctacagcagcctctgagcttctgcagggcctcccctaagctgggctcataggggtcaatgttaggggtgacgtcgtgaccagaaacacccttcttccacgggtttgtctttccaccaccattaaattgagcaataccatgcaaatagctgccagatcaagggaatttctccagctggggtctttgtctttctccctcctcccaccttcctcctccctcctctctccccattgtgtcctcctcccaccgacacccaccacccagtgcctcaaggaacttccttctgaatgatggtttattaagcacttctggaatagctgtcaatctgataatgataagaacagcagcaaacacattcagggtcttcacgtgccctgccctgacagcagcactaactcttggtcccctggaccgcactctgggcaggacacctgcttctcggccgccttccggaagcactgggacacaggctggagtcctccagggactcgcagcatctctgcagctccggagccttcacagagcccaggctccctgactcgggcccacgctataaccatgtgcatgccgcctctcccgctcagagagcttccgccagtgcccccaacttagagtcgttcctcaatctgagagctgttaaggaatcaattcatcttttaaattatatttttgattgttttttctgataacacaagtaacataatgcagaaaaatttcacacacaggagtgtgcaacccagcaggggaaacgtccctgtcatctcagctgcttagagagaggcaccgctagttaggtggtcctccttcaagatcttctcctttgtagaaagtgaaaaacacacatgtatcctgtattttattctttcaaaccgaaagccccactggacctgccttcgcagctccctcctcgccttccctgtgtgtcttgggaggataccatgttccactttggatgaatttctcctatctgtgggtagctgtgactgactcacaccagccctattgccactggacactggtgacaagtctaagtaacgcagttgggcagggacattgtttggtgaggtgatgtggaatcaggctgggacagtggttggtgaggtgatgtggaatcgggctgggacagtggttggtgaggtgatgtggaattgggctgggacagtggttggtgaggtgatgtggattccggaggggacagtggttggtgaagtgatgtggaatcaggctgggacagtggttggtgaggtgatgtggaatcgggctgggacagtggttggtgaggtgatgtggaattgggctgggacagtggttggtgaggtgatgtggattccggcggggacagtggttggtgaagtgatgtggaatcaggctgggacagtggttggtgaggtgatgtggaatcgggctgggacagtggttggtgaggtgatgtggaattgggctgggacagtggttggtgaggtgatgtggattccggcggggacagtggttggtgaagtgatgtggaatcaggctgggacagtggttggtgaggtgatgtggaattggcctgggacattgtttggtgaagtgatgtggaatcaggctgggacagtgattggtgaggtgatgtggaatagggctgggacactggttggtgaggtgatgtggaattgggctgggacattgtttggtgaggtgatgtggaatagggctgggacagtggttggtgaggtgatgtggaattgagctgggacggtggttggtgaggtgatgtggtataaggctgggacagtggttggtgaggtgatgtggaattgagctgggacggtggttggtgaggtgatgtggaatcaggctgggacactggttggtgaggtgatgtggaatcaggctgggacggtggctggtgaggtgatgtggattcgggtggggacactggttggtgaggtgatgtggtcatccggcagggacggtgagttggtgaggtgatgtggattctgacagggacagtggtttctgaggtgatgtggattcgggtggggacactggttggtgaggtgatgtggtcatccagtggggacagtggttggtgaggtgatgtggaattgggctgggataatgtttgggtgagctgatgtgtaattgggcggggacagtggttaggtgagatggtgtggtcatcaggctgggaccctctgctgtgactgagacccgtgtgtattgtcactcccgggaggcttcccggaggtggtgacattgtgtgtgatcagcatgtgttagtaagtttggtgcattcaaagaccaactctgagtccattgcctcagccccagggtagcccaggtgatgccaggagggaggggctacagggtttgcagttctgggttggaaaggccgaggccaaggaaggagtgtggacccaatcggctgcccacttagtgtccccgcccaagcattcactgtctttactgaagagcctcctggagcaggtctgctgcatgtctctgttcctgttcggagtgctctgagcgttggacctgagctttggaggacggggggagtttctccaggtggacctggcagaatgagaggagggcggggacaactcaaagaccaccccccacccaccgaccagggagagtgtccacctctcctcacaatggacttgctgcgagtcctcattggggagtttggtgatggcatagccttcctgaaggagacaagggaaagtggccttaggttttccagagtctgtgaggtttcagggaaaagccaggtccaagcagaggcatttctggagctgccgggaggggcatgtcctgagaggggcacacttgggggccacagccttgcagaccccccgccccagggctgagccctctagactttccagaggcccagcccttcctgggtcgagatgaactcacagaatgattttagcatttggtaccttttccttttccttctgagagtgatgccacctctcacagctcccggaagtgcatggccaccgagtccctccccacccctcggccagcagggacatgatttaccgctagatttggtctccagaagccccttcacactgactctgccctgagacttccaaatactgggttgtgaccaatcccaggactcggggaagcaagagcagtaagaattcagtgtgtgtgtgcaagtgtgtgtatgtgcgtgtgcatatgtgtgtgtatgtatttgtgtggatgtgtgtgtgcaagtggatgtgtgtatgtgtgtgtatttttgtgtgtgcatgtgcatatgtgtgtgtatttgtgtggatgtgtgtgtgcaagtggatgtgtggatgtgtgtgtgcgtgtgcatgtgtgtctgtgtgtatgtgtgtgcatgtgtagtgtgtgtgcatacgttatagatgtagatattagggacatatatgtacagtcacacttcacttaatgacagggacatactctgagaaatgcgtcagcagctgatttcatcaccgtacaaacatcagagtgaactgatgcaaacctacatggtccagccttctgcacccctcggcttcatggtagagcctgttgctccaggcggcaaacctgtccatcctgtgactggactgggtactgcagacagcagtaacaatggtatttatggagctaaacaaatctaaacacagaaaagggacagtaaaaatacagcattctgatcccacgggcccaccaccgtgtctatggtctgtcactggtggagacgtccttacgcagcacatgactgtgtatcgcacacctgtctatgtgtgtatgtgtatatatgcatgtatgtttgagtccttaaaataaactagcacccatgacagcctactgagcacttttgtgtattatcggaatctgcaaagaaataaacccttgctgtttttgccaaggacgtaaaattcttcaccttgtcttagagcaaggaaatttccagacattaggtaaaaccaggtccaatgaggggtaaagatgtgtgtgtgtatgtgtgtgtctgtgtgtatgcatgtgtgtgtctgtgtgtgtctgtatgtatgtgtgtatgtatgtgtgtctgcatgtatgtgtttatatgtgtctgtatatgtttgtgtgtatgtctatgtatgtatgtgtgtatgtgtgtgtatgtatgtgtgtgtatgtgtgtgtctgtatgtgtgtctttgtgtgtgtgtgtgtgtctgtgtgtgtgtgtatgtaacttgtttttatatttgttttcatcacctatgtgctcaacttgaatcaaggaatttatcagaggaatatttattatttccaaaggcatcaaggtattttatttttgttctggttaacatcttcttaaagagatctgtttgaaatagatagactgacataagactaatctccctttaggcttaaaagagaaaggatgagaaaaagtcctggcctcttaaatcacgtgaatttgcttttactgtgggcacattttgtgccacgtttcctaataagcatttattaattggaccaggaaattttctcagatctgtgtccgtgcgagcaaatccccaggcacggaagtgtgatggggcaggggcaagtttataacaactttataccattgcaaaagcacatctgtgtgccatatgactccatttgcggctactcatacacatttctgcagcaattgatcagaaacattgatttagattctattttaatactctgttttctactagcaagcaagcttttttgttttttgttttttgtttttttttttgcaaatgctagataggacctcagaaatgcccgtgtggatattggtcaaaagttagcacattttcctgaaagccttgaagctagttgtgtgaggaggtttatgaaaggagaatttttttccagttatccaattaaaatgatccatgagctcagccagccccgggatggagaggagggagaatgccagctgggtctcgaatggctattttgggatctacggggactctgttaactgatcaccggctcacctggtcacagctcagcctggtgacaatcagagaggccagtcactttcaaggcacaccacagtatatcagatgcttccctgtgatgaaggcgggtacgagcagtcactccaggcctgtccctgatgctttcctgtgatgaaggccagtgcagggggccacgtcgggcctgttcctgggctgtgctgcctcctggtctcctttcacaggcagattctgtggactgcctgctctgctccaatgctgtgctggaaatgtgggggaggcctggggagtgtgtaaggggagcggctttagcttgacttctgatgaaactgcataggatctttgagcaaaggtaattctgtgggtggggcagcgagcagatgaccacgtgtgggcttgagtccccaaggccgaaggcactggtcatgcttggcctctgccactcagcacctgctccacagtgcctgctgcccagcccacctgcctcctctgccctgcgtccgctccactgcagccttttagagcgtggatcactctctagaattgtgtttatttatttccttggaattttcagccttcctgagctacagcgttagagggcaaaggcctggtctcatccacctgggcatccccagcacctagagcccaacaacaggcagaagtggagcatgcatggaatcgaacaatcatgccccccataattgtatgaggcaggacttggtgctatttatcagaaacgaattgtcactcacagctccaagtcaccttcctactgaaaacgcttctcagacactctttctttcttttttttttttttttttttttttttgagacagagtcttgctctgttgcccaggctggagtgcagtggtgcaaacttggctcagtgcaacctccacctcccaggttcaagcgagtctcctgcctcagcctcccgagtaggtgggattacaggtgcccgccatgacacccagctaatttcttgtatttttagtggagacagggttttgccatgttggccaggttggtcttgaactcctgacctcaggagatccactctcctcagctatgatcacaggtgtgagccaccatgcccagacccagacactcataaaggcaccgtttcctaaacgtgcagggtgtcgggaagaggcgcaggtagagtgggaaggaggaagccacactgacttgcctggcattctttatggaccaggcactgctgtttctactccctcctttacggaggagctacaggcactggttctgcatcaacactgctggactgtgccccttcccaggcttgaggcggaggagaaaatcacttcgcagggtggtcaaggtgcagctttcaagatgaccctttgactgagggaaatgaggaggtaaacatatctttaaatcatccttgccagataaaatgtgaatttggatttcaaactggaaaagagaatgctttctcggatggaggctgtgcaccttggggatgccagggctcacccaagataatgagcacacttggaggaaggctgaactggggttctgggatagaagtaaaaactcctaaaaacaggcacctccaggaggaggggctgccagccccacagttggacacaggggtgtgagggtaccttagatttccagtctcctgcgtgctttagagatgagaagccactcctgtctcctggcaccgtgaagaggagattagcaggcggttttctcctctgcacgggagccaccttcacaagcctgctctgccgagcgctggcgatacgcggcagatagtgctgacagaagccgaagtgaaatgtcatagcttcagatcccgtgcgccgccggagagctggaatgaggcctgttgtgccttcagagactaacagctaaatccttcattctttcagctcccagcatatggcatgaagtagggagtgaaagatagatttctttggataggtgcagaaaatatgtgcaacgttttcactgcctggctgcatagaaggatcaaaacagccatgttttctgagagcagaatttgaatgctttgaagccgtgcctccagattggtaatgttgattcagaattaatacctacttagagtaattagcaacttatgcagtaggcacagaggtcaccgaacaaggagaggattaactgaagacacataccctgcctctgccggaggttacaggccagttgcccgcagaggcgtcctgcccgggaggcatgaaccagcttcatttcattcttcttgctggccctgctgctgtgggtatcagatgtattccacggggccctgcaaactcacaccatcagacccgaacgagggtctgaactgtcctggagctcaggttgctcaggagaaactgagtacagtctaggggtgcccagcaagcccctttccatggtgcctctcatccttgagcctgagatcaccacagagagggcatgtctcgctctgggtctagccacagaggaatccgaggtctgccatcagctcgggaccttgtgaggttccacatggcggtgcttttgtgctggggacaacaggagagagcagtgaacccctggatcctccagcacgtcccacaggggaggtcaaaaatgcagggaggcagtcacagtgtctgagagaggagcttcgacttggaaaatggtgagccctggcatctcatctagctggggacgctcggttccctcggaatttgcaccaacctccttcgtccaatccttcccctctctgcagttggactgctgagctgggctttgccccagtgacttggccgccacactgagctacacagcaggaaaggatgcagctcctcctgtggggtctccaggcccggcctcacccacccgctgccaggcctcaggcacccgaccagccccctccatgaggctcctcttccatgaggcccctcctcctccaggccctggttctgccagctgggctgcacctcctagcctacaggtctgtcccacctgcgtttcctgagcccctcttgcaagcctcacatccatgtcagcacagagacagatctaaagaggaaggggccatgtctgtgccaggctggattgtgggcccctcccacacatgccttggtctaccaaccaggtatgcttgaaggaagcagaaggaaagaatgagaaccgccccccacaaaccaacaaggccgactcgggcacagaaggaagctccgaggcctttacagggctgagccaggggcagggcctggggcccagatgtccagtacctcagggactctttctcctgggcgcaggaggaactgggaggcaggtgcagcacccctggtgagacttgggctgaggatgctagagaggggcgggaatggatgtgaaagtgtggtcaagactagcactggctgagcgccagctgtgtactgagcaccagctgtgtactgagcgccagctgtgtacagcagagctcactcctccacaacatggtccttaagacgggaccggggctgagatcccagcaggccagtgcctgggtcagggagggcaggagctgaggcttgagggggtactctggcccaagtccaccctctgacccactaccctccatggtccatggggctgccctggcccagggctctagaacatactaccagggaggtggcagaggagagtgggctgaatggaggcccccaaaacatacatccatgtcctcacccccagaacccatgaataggacattacttggaaaaagagtgtttgaagatgtgatggaattaagaatcgcaagatgagatcatcctgggtgatctaggcgcaccctaaatccaatggcaggggtccttacgagagacgcacagaatgcagttggggaaaagagagtaaggccgcaagaagacagaggccgagactggactaatgcagccacaagtaaggaatgtccggagctcccaggggctggaagaggctggaagggccctcccctagagccttcggagggagcatggccctgcacacaccttgatctcagacttctgaaatcaagaatgtgttgcagcagccccgggaagctaacataggaggccccaattgcaaacattcggatgtgcggatgaaggatcctaggggttcctggggcctgagaatgaggacgaaagatggaaaggatggaagatgctgatgagaagcccagttcatagggcccacacccaggcgagtctggatccttaggaaaagaacatcagatggcacagaaataagacagaaggccgggcacagtggctcacgcctgtaataccagcactttgggaggctgaggcgggtggatcacaaggtcaagagttcaagactagcctggccaacatggtaaaaccccgtctctactaagaatacaaaaattagctgagcgtggtggtggacacttgtaatgccagctactcgggaggctgaggaaggagaatcgcttgaacccaggaggcggaggttgcagtgagccgagatcacgccactgcactccagcctgggcgacagagcaagactccatctcggggcggggggaacaaaaaaaaggaaatccctaaccctgctctcatcacagctccctgtgttccagaacccagcagggttcccgactgcaaaccactgaaatctaaactcatgggccctccctggaggtgtatctccccggagggacgtctccccagaggggtgtccatctccggatcccccagggctgtctcctctgtccgagaagtgctgctcctgctccaggctggaaggtcctcacctgtccacctgcccaggagacgcttctacccattcccacacccgggtctctcaaccctcccatctgtttcttctcttttgcggagtaagtgcctccctgcagagccagggctgggcagcagaagtcagagatggagccaggagaagagggttctggcctggccggccattccttggctgttttgctcaggctcatcactgagctggcaccatcttgggcctgtctcacactgccacactgcccgagacagcagccattagccgcacgttgctggacagcacagacctggcacgtgtcgtccaccctcggaggggtccccttgcacgggctccactccggacggtccctgagactctcccgccctcacgcctgctctctaagccaagcacaaagccaagtgcagcccccactgaccattccagcccatgccggcgtctgccccaggccccagatccgtcctgctggtgcgattgagggcacagagtcgagccttcaagtaggtcttctaatatggctccattcatgcagaaacctcccagtggggctgtgccaggcacttggaaagtgggagccgcagccctgccgtccgggtgcttcccattcaggggaagcaagtcagaaaccaaggcaaggagctcattcccggggctggtgactgcaggtgcccgcagagggcacgggggacgtgcccttggtcaggcggtcagcagcaaaggcctctcccaggaaggcacctgagctgggactggtgggcttgcaattgtgtcctggagtgggtctaggagaatacgctagagcctgtctccagccttggtgctgccgacatgtggggccagagtctcagctgtggggcgtgcactgtggggtgctcagcagatccctggtccccacccagtagacccccccgcagtgtgacaaccaaggagatctccagacattgagaacctctgggggtcactgctggaaggaaggaacccgagcttggatgtgcttagccttttgtgtccgcctgatgtcgggctgccttggggcatggggctgagagttcggagtgtgttaaaccagtaactgactgagggcagcttgataagctactcacttcgcatatgcaaggatatccccacctttggtggttgcatcccgttacagattcacccactttatgctacacaagaatggccgctggcaggtccccacagtggctggtcatgtggaacgtgtttacagtgtctttatctggagaaagatgacttttctgttctcattacagcctcggccatggacatgatttgttagaaccttactatgaagtgtgtggtggcgcacaggcgctctgaccttctccgtatccctgcatttaattagctggtcatcctgtccttcggtaaaggtcacggtggctgtaaatgcatttggggggatgctggccagcatgcggcctggctgatgagggggcagagaggcagggtctgtggtgctcacacctcgaacgcccccagtcatcacaagcccccccagtgcagggcgggcactggggctccctgggctagtgacagggccacggttgccaggtcagcgggcacagccagctgcccctctccacagctctgcccaggagcactgttcaccgtgggtaagcaaccccaagtggctaattaggatatgtggcagcagcactttctggctctccgagttgttgtccactcgagaaagtgttattttcaacagattgcttctcacacagcttcctgccaagtcatgtccccaggctggatgacatcaccccactcaacctttctcgagcctgtgtagttgtttcgtggaggtcactgtgtcgttagcgtcaaaaggaaaacagagctgaagacaaattagaggggaagaaagagtctgagcgggagcaggcctgctgctgggggctttcaccgcggacccggggctttcaccgctgacccggggctttcaccgctgacccggggcacacacatgtcgtgaccagcctgtaagaacatcttcacttccaagggctcagctgcatgggctggcaatggctgagtgagtacaaaccaaacagtgaggccaggggtttccactgttggggggccccatgtcaagcccaggaagtgtcaaaatgtgagcaggtggctgctgaggaacgaggctcacagcgccggagctgcaggtatccgtgcaggcgtgcactcggaacaccccacccccggggacaaggaagggggcctctggtcagaggatgtggtggcttcccttctcctggtgcctcaaaggtcccagagggtggaatgcgccatgtcctgtccccttcactccagccgtgagctctgcctgctcttgccttcaaagactgattcacagtgagggaggcccagttctgcccacagacatacattccctagatctgcacgtcaggggagcgctcagcatcgacagggaagacagttttttcactgtcagccgttctgactggccgggtaggaaatatgcctgcgtggctggtcacgtctcctgcatctgggatatattcttggtctgtccttgggcttatattagactcttggggtcaggccttccttgaaaaacgtgtggatcagaaacttggtctttctttactccagcgcatgacagaagttccttggtagcacgtcagcccagagggcaggaacccagagaggtctcagggttgtcaccccagcaagggacccgctgtgtcatcagcctccgtgcatgcctggtcagtgaaagaatgtcaccccgtacggcctcactgtggggccacacatcaccccatacagcctcactgtggggccacacgtcaccccatacggcctccctgtggggccacacatcaccctatacggcctcactgtggggccatgtctgtcttcatgggtgtcttcttcatgtcttcttcatgtctgtcttcatggcccaggcctggggcagagccggggttgccggctcagcgggtgagtgccacatgagtcttgccttcaaagctggagtgcctgatcttgacagcggaccgacatcttcaagggaacggcggctccccccttttttgcagaacactttcaaaggtgtattcgtgttccagggccgccataacagagcgccacagaggggcggtgtaaacagcagaggtgtatgctctcgctgctctggaggatggaagcttaaagccgaggcatcggcaggggtggtttgacgaaagccgtcagagagctcggagggaagactctgttccaggcctctctcctcggcttgcaggtgccatcttcttcccgcatctcttcacatcgccttccctctgggagtgtgtctgtgcccaagtctccagttttctaagaacagcagacatacaggattgggacccaccttactccaatatgacctcatcgcaactaatttcatgtgccatgaccccatttccaaacaaagtcacattatgagatgctggggtggaatttcaatgtatgaattgcaggggacagaattgaacccataacaagcgagtgaatggatgtcagggtcgtggctgtgagattccccacgggtgagtgagttccatgcatccagggctggtggacatctgggcttgtccacataggtgggtttggaggtttgggtgcagctggcagtgccatggcctccaagcgatcaggacatgcccatcctcactgggtggggaccagccctgtgggcttcgggtcctcatgggagtggcgtgtgccatggggtgccttccagccagcacagcgggtctacggatcagttgggggtggattgcaaaccaaagcaagagcaagaaggaacggactcaccaggcaggcctccagcgctggtagcttaggagctgcagttcctggaacctcggttcggctcacgcggggatctccccttctcagggttgaccttgttcttaatgattcggacaaagcgtccattggcaaaacatttccagatttgggatatccaggtgagcccagaatggagttttcttcagtccaaaaaagactgctttcgagtgggacaagtttgaccttatcacagaagcatgggtgtgactcaggccgaagagaagttcactcagctgcgtgaagcctcgtcctcctccttcgtcagctgattagctggcagccgggaggaagagcctagacctcacggaggtcttgataaagcccctcttcaccgaagtgcagtcaagtctgcaagacagaaattggacaatgggaagaaagcgtcttcttcactgccatttcccggtcccttcagctctgttgagtggttctcatgctgagagttggccgagaagcaataaaacacggtcctctgccactttctccataaagcccagctggccgcctcataggaccatttctgacaaactgggttttgctgagaaccacacaaagacggcaaaataagactggcttgtaattgcccatttctcgatccttgtggaatcgggggcccaggatgggaccgaacaaaggtgtgtgcagagttagacgaggcaggagccacgtaatgggtccctctgtcctccaggaacgctccacacaaaacattgctctgtaaaaagacgacaagggccaccctcccaaacgcagcccaagtcactagcctaggtgcagacgcttcgcactgtgtgttgttacggtccttgcaggcattctggtgatgcaattcattcttctgaagcgtatgaaagctgagtgcgaccttgagccagagccgtcaaagttgaagcaaggtaaagcggttgcttgtaattacacactttttaatttatctgtgtatgcatcttaaaatcacaaaaactttgtttgtacttgagctgcagattcaaaagtgcttagtaaatccaattacaggcaatgtcacctgtagaaaaagcacagggcatttctgtctagtttatcgtgttatttttttccaaagtactttgaaggattttgcaattaatctgctgttccatttgattgaaatttagagttcttgatctacatctgtcaccttcctgcaaagcaaatcaggcctggtgtgtgacaacccgctttttacgtgtgggaggtcttgccaggcgtgtgctcagctggcagaggctgtgtgcgtgcggccctgagggtgtgaagacttcctcaacaagcctttcttcatctcactctgcgtgccgtggtcagtgccatgttttcgggtagagcaatgaacataaaggatgtcatccctcttggctgaatttacactctggtggggcagggggccacgggatgttagaaatgcggcagagaccaagctgtgatcagaagtgggggctcttggacgagctcagaacacacaggccttgggttgtttgtcttttcctgacttctatgtgcagtggatttcctgctttgtggcagaggctgctctgagcacagagacctgagcatcatgaggcattcatcctagtttaaggagacgggcagtacacaccacgagtgtcatggagaaaataggcctggcaggatggacacagttgatactcgagcgtgaatggagacactggcagcaggggcatttcataaggaggggacagtgtggctgggatatgggcggccttgcatttgcagagtatttaacctaatattgaaaagacatcatttgtccccaccaacaaattagtggggaaggaaggagtgaggtcaggtgtggggatcaaagctcctcgtccccagcttgtgtcccttccccgtcgcacctcttccccgtgcctggatgaatctgcaaagagagcggggatctgatgtgtgcagccatctcattggccatacaagagctgtccatgtctcatctgggccctggtgatgaggtggctccactcggggcagggttgaggctttctgtgtctgcatcagaccctgtgcactattcagcctccctcccctgactgtgtccttttcattttaattttaagcacatgggatttaaacaatatttactcagagctgctttaccttgtattttcatttggaaatattaattgtgacctttcagaactcccaattaaatttttccaataaaatgaaaaggttgagctggagcagaggcaggggtgtggttgggatgagggtggcagagtcacagccgctgggagtggccgggcaggtggctgtgccctgtgggtccctggctcgagccaggcctcgagcgctcttggctgagcctggaagaagcagcagaattccccgtcttggggtcgggcaccagtggctgaaacgcatttccatgggggtcaggacagtcctcggcatctccagcacctgaagttgcagtgtttgagaagtgcagacgggacaggatccctggttctctctgtgttgtctcaaggtgctgcgaggaaggcatcagctcacaggaaacccagctccttcccaagcagaagtagtggcagcactgcctccccactctgacattctcagaatgggcttttgcagtggagaaccaatgcaggtgctgatccaggtcactcgggaggaaggaggccccaggtcaggcagccttgtggggcgctctcgttaaagctggaacctgctctgggtgctgtgccacctttcagcccaagtcaagttttctggaggcctggctggcgccgccttctgagagaggagagcggctggccctgaagcccccagagccaggttgcttggcaggggtggtgggatccggtggccacagcgtgcagtaggagttggggtgtcgtctcagtgggtagagtcactctcacccctggtgtccacagagcttttgagttttcaagataagccaaacatctgggcttttttaaaatatggaatttgccaatatctaatctctacggtgtcagccgggatgtctgagtcttggcatggtcatcatcatgggcattaaatggggtggcgccgctctgggcaccacaggcatttagcagcatctctggcatccactcaggagatgccagtagcaccacccccagctgtgactacaggaatgtctccagatactgccaagtgtctcctagggccaaatgcacccagattccagaaccagggatatagagtatgggctgtcattttgtgaattctctaatagtccaaccaaaggacccgggtgtgagctaatggccagctggacccaggaacgcgttggggctcaaaggtcccctgagcacacagtccttctgcacccagccagctgctgcttcccatccgctttgtctcgttggcatgtccctctttaggacacaggggccttgtgcctagacctagcagacttcctgcaaaccccactcactcacaaacttcagggaatatttgttctcaccttggtggaggcatccgcacctgagctaactcaagaccccaggtggggctgttttacgaatcccatgaaatgaacagaatgtcaccctgctgcctgtcccggccaggccccttccacctggcgggggagatggtgtacaacagccgatctgggggaccagaccccgggggttccacaccgcagagggagcacgttcagcccttcatctctggcttctgcgtttggtttatgtgctcaaatattgctcactgggtctaacccctcagtgtgggagagccgtaggtgccccagtggccatcttcacagtgtctttcaatctcagagtcctcggcccatggccattcatgcaagcagcagctggtccgttcctgccacttccaaggacgctctgtcaggagagccaccctcatgggacttcctctggcccttgtagttctgggtgggagcgtgtagaaaagggggactcattgcagcttggcctggaggccccctcacccaagctgcatatccctggaagctggcagctggcttcctctcacgacagctttgagtgtgagcccagtgatgttttaaatgtggtggatgcctgcagaatcgccgacaggctccatttgcaaggggctggccgggctcttctgcacacatttgtgtcaacagtgaaaaattacatcactagcagacaaatcaaataccccagttgtgtcaagatttcccagatgtgatgtgctgagctcggagccccttgtaaattccacgccgcttccttctcttaaaggcgcctgtggatttctcccccacgggtgctggcttggactggacttgggatctgaaagccctgttcttcccttccagacagagagcaagccgtcccaccccattgtgcccagtggctttagcccatgaaactgggtgaggctggctgaggaacagccggcccgacgcctgcccggcgcctgctcggcaactgttctctgtaaaacttttccagctgcgttgctcccagctttcccgtgaggcccaggaccctgtctcagagggtctgggcagctttcccctaagcgacttgggcacagcaggctttggggctgtgtgtttactaaagggggcttcagagggccgggggggatgagagaccggataccccacccaggactccaaccaccacccgaggcaccgacaactgacagaaaactgcagccggcctcatttgccgcagacccccttctctcaacaataacatgtggggcacggtcttaacaaacatgatgagagaaaaggctgtagccaaaggcagctgttcaggaacggagaaagtttagctacgacgaagactccggggaggaagaacggatggaaaggccagcccaaatggaagttggagtttgctgagctgaggacagggcctgtgggatctgctggaagagaggcgaaccaagaccaaagggatcggtttctcccgagctgcacacagtggcaccgactccctgatccccgatgtgtagaaaccaccttggctgaattctcccgagcccgctgcaggccagtgggaacagtggttgggaatctcaccggaactggctcgggcaggacgttcatggtgaggttccaaccggaatgagtcatgtgaccgtcagcatccgacctccacattagccgcatgaccctctgtgatgcccagaccagctgagatgcaatccccgcagagggctgaagagaggcgtctgtggcacgtggtgggggccctggtctttagaagctcctggattctgattgccttcagctgggctttcaggtgggtctgcctgcaagcaatctcaaaggcaacactgttctggaagcttccgtggcggtactctctctccatcttccctgggataaaacaggaagctgaggccagtcccttacacaggcatgagctgtcatccatgtctggacagagtgccggggtccccatgagcgcatggcggggatgccagccctgctgctgagccagtggtcctgagctccctgaggacagcacccgctttgtcttcccacctggtgcccaggagcctggcatggtcctatgcatggaggccctctgtccacatttatgggacaaggaaaggcccaactctgccttcgtcagttgctgcctgcagtgtgtgctttgcgcggcttggacagtaaaggaaacctgggcctgttatacagggaaaggacatcttaaaccaaggccttcagcccaccaggcagccccactggctatgtcctccctggcaccctggggtgctgggtgaacgcgggatgtggacacgtgtgagtgccgtgtaatccttacctgcctagagctcacagcatcctgccctggtgcatagtgaaaatgttaccccataaaaaaggggaaaggatgcaaagatcaataaaaacaaatccttcacaaccgtggtccccaaactttttggcaccagggaccacgtttgtggaagataatgaagacaatttttccatggaccatgagtaggggggacggttttgagataaaactgtcccacctcggatcatcaggtgttagagtctcatgaggaacgcgcagcctagatcccgtgcacgtgcagttcacaacagggttcatgatcgtgagactctggtgtccttgctaatctgacaggaggcggaggacctgccaggaggctcttcctgtgtcctgatctcagctcgggaatgtgtctggtgtgtttgtttccacgttatgcctgcggatgacagggagggtcatggtgtgaaatctggcttaggaaggcggccaccaggctttggagggagagacagtggagtttgcatccaccagtgctgaggagaggaggcagcccagctggctgtgccctggacccaggacctgggctctgctgggggtcccgggctgtggcgcgtctccctgggcatagccatcacccagcacagcagtggtttcaggcaacagcccgggaggaaaacctaggaagaagggctggtgctgcccgcaagtgcctggacctgcacacacacacagggctgagtgtagcgtggccagcagggggttgacttttaccccgaaccagatgtaccaagcaccccgctgactcagactccccgccccccgcctacccccagcagcttggtcccctctgcctcctaactgggttggggcaccaccctccactctccacgttggctgcctcagtctgggtcacagacacaggcttcccagccagggcgactgcagcatccacctcctgccacagtcagggggctatggagaaacccaatccaggccccgggctcccagtttgacacccggccacacagccctgactcgtagccggtggctgcaggctctttgccccccacttccccagccctgctccctccagcctcatgccccttgtagaccctctccaccctcctgtgcctggagcccctcccagacgtttgcaccccaccccttcccatccttggggctcagagaaatgctgccttctccggggaggccccatcctccccagcctcacatgaggcggcgctgcctctgcggaggccccttctctgagtgtgcatcatggacgggcatctcctctgcaggctgtttgttagagatgagcacagaaatcaatagtgggcattggcagacgtgcagaacaccccgcgtgcaatcttttcctggtaatttagttctatcgtattttacaaagtatcagcttgtgacagagattggacattagaaaacaaaaggctgttccttcagccagacggacgggcagcagacctgctcagccctgccttccccgaaggacctcaggctacacgggcagtggggctgcggcccagctcaggcctggctcatgatgggagtgtggaggacactggctgagttcacatcaccccaaagcctcgggtcccagtggcgtagcggccgcccaaatgatgagcccacaacgcacctgcccctctctccaggggagtgcaagcaaatgcaggaaactggggccaggctgggccactgtcaggggttttgctgtccacaaatttaatcaagacagctgtcagcaaaagtcagacttatttatttatttattttctgagagcgtcttgctctgttgcccaggctgtagtgcagtggggtgatcttggctcactgcaacctccgcctcctgggttcaagcaattctcctgcctcagccacccaagtagttgggattacaggcgggtgccaccatgcccggctatttttttctatttttaggagggacggggtttcaccatgttggccaggctggtctcgaacccctggcctcaagtcatccgactgccttagcctcccaaaatgctgggattacaggcatgagccactgtgcctggcaatttttgaatgacaatttttttttttttatcgctggctaatcacagagtgagcagaggtgcatggcagagaaggtagcatggtttccagagtaaaggagggcaaatggcacccataaatggaagcaatattggtgatgctccactctacacacttgccacgtcccctggtcctcacgaagcccaaaatagcaggatggagcgggaggtagaggttctttcttcttgttttcccacagatggcacaagctaattattctcatttgtgtagcaccttacacctctgtagatgtttttcagaatgttggaaaacagatgatcacgtctgtttttgtagccgtgtgagagtttttttcattagcgggatcgggcaagaccatctgtgtgttgtagggaaaagtttgccaccaacagcgagtttaaaactttgaaacagtaactgagtgggatgttcttcccctgtccgtgggcggccagggtgggcctggggaatgcagaatcctcaataaatggatccagaatgaaccgagaacctcaaagccctgccgggcgggtctgcatagccctaggcactatcacccccactagcctcaactcggtgttttttcccagcccagactaatgataaccaagtcagagaactttccagaaaaactggtggccagaagtccctctgctggcagctgcctgtgtgtcctcaaagaagtcagctcacctctctgagcctggtgtcctggctaagtggctgccgattggttctctgggccccaatgtgaaggcattgagtgcttgagtgtctatggatgaaggcggtacaggaactcccaagctgccaagcctcccagcctctatctgtgtgcaggccctgagtcctcgctcctgcggcagagcccccctcctggggagcttcagatgcacgttcccacttcagtccaccagctgcatcaccattgataattaaagcaatgtgcgttgatgaaaagggatttcatccagggaactccacagcccctgcctctggggccctggggctgcaaaggtgatggcctccagaagagctggagggccctggtgaggaaggggcaagggcccatgtggagcagggtgcaggcagagccacgttcatcctgacattctcagtgctgcagagacaaggtgagctgatgctgttccaggctaaagagaccagatgctcacttattcactcaacaaacactttctgaggccctacatgctcagccctgctcgaagtgccgagagaccatgcagtcctgaaagggggtccctgccctcatgaagcgcgcctgccggggagagtgcaccagattcctgtcactgctctaacaaatcgccatgagctcagtggcctgaacatcataggcatacgaccttacagttctcaaggtcagaagctgatatggtttggctgtgaccccacccaaaatctcatcttgaattataatccctctaatctccacgtgtccagagagagaccaggtggaggtaattggatcataggggcagttcccccactactattccagcgatagtgaatgagttctcaaccatgatattgagtgcgttctcatgaaacctgctggttttataaggggttcttcccccttcacccagcacttctccttcctgccttcttgtgaaggaggatgtgtttgcttccccttcgccttccgccatgattgtaagttttctgaggcctccccagccatgctgaactgtgagtcaattaaacctcttccctttacaaatcacccagtctcagatatttccatatagcgatgtgagaatggactaatacagaaggcttgcaggctagccaagtagttggcaggcctggctccttctggagactccagggcagaatcctgcctttcccaatcctggaggccacctgtgttccgactctgccttctaccctcaaagctagcagcacagcctctcccatctccctctgaccttccttcctccctcataaggacgctgtgaggacacagagcccacccagatcatctgggataatctcctgtctcaagatccttgacttaaacacacctgcaagtctcctttgcaatgtaaggtggcatagtcacaggtctgggattaggatttggacatctggggagggccgttattctgcctgccctgggggaagtgaaccatcacctactggcttgggtagcaccgtgtgcggggctgaaacatacaagatatagggtggagggtgaggacgggtggtggaggaaggtgtctctgaggaagtggtattccagctgcagggaggagggggccagccatggagacatctggggacagtcagtgcaagtgtcctggggtgtcatcagcatgacagatagctgtgcactgaggtgagttgctgggagcctgtgacagacactgccccactctgtgcaggaggggtccccagggggttgagcagccttggccaggagagagggaggctggagagaggcttggagggagactgggtcagccagacatggtggtgcagggacggagggtcttccacgtggatgatggaactgagaagccaggagaggctggtgaggctgagtggtccaaggggccgtctccaccaagccaagtaagctgtgtccagactttggacttgatccgtgtggtggagtcctgtgggccttggggcctccaggtggatgggaaggaagggtcagccatgagccctggaggcagtggggctctgtggtgggctgcctggccaaggtgggaggagaaccagctgatgagagagatggcagtcagggacagggtgtttggaaggtcacaccagctctggcagggccaacagtgttgatccagagaggacacttagccactgccctagaggggagaagggcaggatgggagtcctaggaagcagggcggaaggtgcatgggaaggtgccagccctgcccagctcctcctcttcttccctccccaacctctcctcccctcctttcttcctcctccccttctctccagcttaaagcctggatcaaataactgtggtgcaaaaaaccaatcctacaggcacatccctggccctataggggcacccactccaagggacagaccaaagtcagggtatgagtgcccagaaggcagcaggagccgtggcgagctggctgggaattcagaggggcagcccccatcacggaaggctccccatgcccagcctcatgctgggccctggttcagagctggccccatgccctgggcccatgcggtcccctgggcagcccaggagagtgaaagctctgactcgccgagggtggtgggaactcctcgttgacaggcaggaagtcagtttgtgaaatgttaatgtgctaatagagacaagcagtagaaactttgccaggacactggggatggccctgagactcgtgacttggcagttcagagcagaagagccacagctctagaaagcaggtcaagtgtccactgtcgttcactcatgtggccagttctggccccatcttcccatcttgacatttcagaagagccttatccctcctctctctgggcagatgtgcaaaatatgcaaaaataagtaaagatgcttttgaaatgtatctgcacatcctcacaaaatggactgcatctgtgtcctgacccctgcatgtcctccaggttcaaggtgcacatcctgtaccctttggagatgcactttgcaatgctgagcttcaaggtgcatggggtgtctccactcccccccagacctcctgcaaggagtgagctaagccatgggggtcccgtgcaagcagcccacctttcaaagatgcacagaaatgggtcctgtgtactctaagcgtggaactttgtttcttagctttgtttaaaggcactttggacacgtgttcgtggggaaatcttggaattcatcatgcttgtctgcaagggtctctgggatgctgagctccccaggacggagagccgtctcctctgcttatgtagcagcacagttaacggtggatgtgcaggtgtgaggggccaaagactcccccagaaaaggacagtctgtgctcccacgccagcgctgagtgaggccctggggcaagggctgccccccactgccctgctgtatcatatgagcctccgtttccccatgtgagcagcgagggagggggctccccatgggccgcagcaccacacctgcctttcgtgatacctcaaaatggaaagttagaaagcagcccctacgtggttactgagactactagaagcccatctgtggctttaccagtgacaccttctcatcaacaaggcgggtgtgggcatgggacccccatgctcagctttccccgtgcagtgggctgatcagatgtgtgttcaccccagcgggactcagcacatcagcctctatctgaatgggaaacatcactggaaacctgtcttagtccattgtctattctttttttattttattttattttattttattttattttattttatttgagatggagtctcactctgtcgcccaggctggagtgcagtggcgtgatcttggctcactacaagctctgcctcccaggttcacgccattctcctgcctcagcctcccaagtagctggaactacaggcatccgccaccacgcctggctaattttttgtatttttagtagagacggggtttcactgtgttagccaggatggtctccatctcctgacctcatgatccgcccgcctcagcttcccaaagtgctgggattacaggcgtgagccaccacgccgagaaccattgtctattctttaacagaacacctgggactgggtattcatgatattttattttttgttttatttaccttttcttatatatttttattccagtagccttagggatacaagtgtttttggtgacatggatgaattgtacagcggtgaagtctgagattgtcatgtagtggacattgtacccaataggtagtttttaatctctcgctaccctcccacactcccctcttctgggtcttcagtgtccattataccactctccatgactttgtgctccctagctcagctcccacttacaagtgaggacatggaatatttggttttccattcctgagttacttcacttagaataatggcctctagttccatccaagttgccacacaagatattgtttcattctttttatggctgagtagtatttcatgacacatatatatgctacattttccttatttactcattggctgatgggcacttgggttggtaacatgtctttgcaattgtgaattgtgctgtgataaacatacaagtgcagttgtctttttgatgcggtgacgtcttttccattgggtagatacccagtagagggactgctggatcaaatggtaaatcttctttttagttctttaagaaatctccatgctgttttccatagaggttgtattaatttacattcccatcagcaatgtgtgagcatttgctttcaccacatccacgccaacatctattgttttttgacgttttgataatggccattctgtctagggaaaggtaatatctctgtggttttcctttgcatttccctgatgattagtgatgctgagcattctttcctatatgtgttggtcatttgtatatcttcttctgagaagtgtctattcatgtcattggctcacttttgatgggattgttcctttttttcttgctgatttgagttctttgtaaattctgcatatgagtcctttgttggatgcagagtttgcaaatattttctcagacaaggtaatttatggagaaaagtgtatttgagtgacagttctggaggctgggaagtctaaggccatggctttggcacctggtgtgggccctcctgcttcctcataccatgagggaaggcatcacatggtgaccagagagctgactcttacaacaaagccactccttccataacaagcccactcccaagataacaacattaatccattcacgagggcagagccctgattaatccattcatgtgggtagaaggattaagtttccaactcaaacacattcaaaccacagcaccttttaaatttgcctctagggacagacataggtggctccctctggtctgagaccacccagctttgccggagtctggggacccctgagactgaaagccctgggatgtgactcaggtctcagagcaaggaggtcagcagcctcttggaagtcacagcaatgctcatctaacatgcagcttgccggcccaggtcccatgcactgggccaggcctgagggccatagcaggagccagcatttctaacatgctctcagcaggattggagagcccctgcgattgggtggccccctcagagaccccacctgatgccactttgcctgacaaagttccacagccccctctgggctttcttcggccagacatgcctggccacacttcaccgtggctccaggcagcagcagccccagtgccagctggggctctggaggtggcttcttttgctgtcactgtgctcggctggagctgtaaaggggcagatgctcctcacctgtgagccaccccttggctggagctgtaaaggggtagatgctcctcacctgtgagccgccccttggctggagctataaaggggcagatgctcctcacctgtgagccgccccttggctggagctataaagggacagatgctccttccctgtgagcctccccttggctggacctgtaaaggggtggacactcctcacccatgagctgcctcttggctggacctgtaaaggggtggacgctcctcgcctgtgagcctcctcttggctggagctgtaaaggggtggacgctcatcacctatgagctgcctcttgccctgagctggggctttgggggcaggacccagcaggaggaagtgtcccatcctcactggaggtctgagtgctgcttttcacctgtccacaggcacccactaaggtaatccccatgggcttgtctacagaatagtgcaggcttgtgtcccgcaaagaaagactcaccaaagcccttcgcttcatctaatagctgaggttggatcaagtgtggtgttcacacctgtaatcccagcactttgggaggccgaggcaggaggatcatctgaagtcaggagtttgagaccagcctggccaacatggtgaaaccccatctctactaaaaatacaaaaattagctaggtgtttggtgggtgcctgtaatcccagctactaaggaggctgaagcaggagaattgctcaaacctgggaggcagaggttgcagggagctgagatcccaccactgtactcgagcctgggcaacagagtgagcctctatctcaaaaaaataaataaataataaataaaatccaaggtccttgatgtataactgaccttgaggctgtggaatgtggttcttgggcaggcattcaccaggtagaggaaaccctctgcaccctcgtcatggcccactggctgccagtgccagcagcttcttcccatccctgctcctcagcatgctgggccatgagcagggcagggcgtcagggcagggtggcaggagcagctcctcctgcttggcagagatgagtaaagcactcaacatgcaccaagtcccccttgacttgtccccactgctgctgctgtcacaggacaaaggcaggggagcgggagcagcccaggacagccacagggccatgagcaccatgccaccgggagctagtgacaacacagggtggacaggacagagagtggcccagtactgggcaggaccagccacagacgctgctgctctctgagcacggggactctttgcagtggcgcccatcacttgggcagctggaagcacagtttccccccacagatatttcgtggggtttttttggtttttggtttttggttttttgtcgttgtttttttgtttgtttgtttgtttttttgagatggagtctcgccctgtcaccgaagctggagtgcagtggtgcgatcttggttcactgcaacctctgcatcctgggttcaagtgattctcctgcctcagccccctgagtagctgggattacaggcgcacaccaccacacctggataattttgaatttttcatagaggcaggttttcaccatgttggtcaggctggtctcgaactcctgaccttaaggtgatctgccggcctcggcctcccaacgtgctgggatgacaggcgtgagccaccatgtctgatacttggttttaataagtgtgcatcaccgccctgccccccgcccccagcccccagtgtgctcaggtagccgtgaaccaggtgttgggctagtttagtggaagggactgacatggagacaggagagtgggctctggcactgtgagggaggccgaggagcccaccgcctgaggtcaagtcctgcctgtgccacagaaggccctgatgtcccctacaacctcacacatcacatcctcagcaccctaccaatgctggcctctgtgggtagcgtcccctgtgaagggatgcggccctttactgtagccacgctgacctggtcccagagaaggcaagggagcacccacactgtgggggtggggctggttaggacccacccggaagactgagccgctgggtcctgctgccttccccagggcagggtgaagggtatatgctgtccaaggggccctgccttccagaccccactctgcctccgggggaagcccaaacctgcccttctcggcatccctgcctctcctgtaaggcgctgccaagccacactcgagtcactgttcttcctggatcatgccaagggtgggagcctggtccctctgggtgttgaaggagataattcaggtgtgatgaaaaggaatgctcctctctggctctggacacacccaacacagaaggaggcaggtgcctgctaaggctgacgctggttagaggcagtgccaggacagtgccgtcccatatcccaggccgtgcttcccttcctggaacaggccaacctcgatcacagccaagcaccacctgcacaggctcacagggcagagcgctgcaggggctacccgactgggtgtcctaaggtgaacagaagcctttcaatgggacattaacttgaaccgaagccagaggagcctgcatgacactgtgtgaattagcttactcaactgaaacagggcatttgagtgcaggagacactaggctaacaggccaccctacacccctgcacacacacactctcaccagctgcggaggaggctgcacccaccatcccgggctcccagcgacagctggctctatcttggacttcactgttcctgctgtcaggctggggatggaactctctgtctgctgcttgttggagctcttccagcccagggtgttggttagtgggtgaagcaggggtcttctctcctcgccctgccccctgccctgcaccagatgaaagagcacactcagcatcacgagtggctctaagtgtgatgagagaaggaccctccctggccacactcgtgctaataggaagtgctggcgaaagcaaatgatcaaaatcgtatcccagcctcttcatgtcacctgcagccaaatggctttgcatctgaaagccacacataattgtcagcatccatgggttctaatcagagatttttttttttaagtcttggtagtttttgttcattgctaatacagagaaggatgcaagccactgtttagtgtctggatgtaaaagaacatttctgtgccgtgtggcctcattgcagaatcttccaaggtacgagtcagccacggaggcctgtgaggtttttattccttgctttcaaaaacacaagctgtttttcccctggaagagcatgtaatgtgcaaaaacattagcaatattgcaaaatgcttgcgtgaaataactgtggaaatatttcactaactacattaaccttcgctggcttttcttcccctcccaacccaaagagagataatttctcgggagtctttatctcgttcctctgtataattgccgctttaaatcacaaaagcctttagagttatggatgcaaaacgcatggagctatgtttaggctgtgctcacctgcaaagctgtgcgatccaatgtccccccagaagagaaaccaaaggaagagcgtggggaaagctggtgtctctctcgaggtgtttccgagcagccgtgttaatatcatacgacaagatggggccctgtctctcgtcacttccttttgttctttccttctgaagagtggataattcctggcagtttctgtttcgcttgtaattgttttttaaattaagataaaccttgcagccctgactgttgagatgaaggcgcggctggtggggaagcaccttgcttttgtgaacagcagaaaaggtgataagacattgcggtgtgctccctcccagagtttaagcaccgcagttaccactttgcaccatgctcatgggtgagcgggcgtcttccttcttgcaagttcctcccatgtctcagtaacggagaaggaggcggtagtggagggcagtcggcggtgggggttggggagtgccgcctgctgtttggcagcatcgcccgtgtgtctgcagggccctcctgccttcgggtggagggcatgttcacgtaagttgactcatgttttgggcgaacgttggtggtgagaggagctgaagtctccccatctctcaaggatgcagcagccaggtttagttctgtgctctatgggccgcacctcctggccccccatcctgctccggattccacagcttggtcttgactcaccaggaagcagggcagcaacttgagagtgatgcaggggacacgtgcaggggtgcagagtgtaggggtgcaggggtgcgaagtgtaagtgtgtaggggtgcagggatgcaagatgtaggggtgcagagtggaggggtgaaggggtggagaatgcaggggtgtaggggtgcagggatgcagagtggaggggtacagagtggaggggtatggggtgcagagtgtaggggtgcaggggtgcagagtacaggggtacagagtaggggtgtacagtgcaggggtgcagcatgcaggggtgcagagtgccattcctaagccatcgtcttgtgtctgtgttctgtgtatttgcttgcatgcttttctctccagcgtgattttctgatccgtggatacacacaggctcctccctattcagctaaacctcccagctgcctctaaaagctggggattgtaggggtcggggaggcgtgttctctcattgtaccatcacattgaattgtctcaaacaccctgccaggtagaggtggttatttccctttgacatgagacagtaaccattagcttggtggcttcccttggtccagtgagtcattaaacctgacttgttggctacaggcgagtgcctggtggtttctgggcattgtgcttggtcagatccgacgttccgagggttcagctctccaaggccacaccatgtgtccccccggctccctgccctgagctcctcccgaggtagcttgccactcttgcaccctccagtagctctagcacagagtaggagctaagcgcacagtgggactcagtgacctgaagcgggaggtgaattgaatgcctccaggatgagtatgtctcttctcagcagccagaagggtccagtccagaggctgcccttcactgagagcatgctttgctctctaaggaaagcccagagctttctttcaccatcttctaatgtgcattcagcagaagctgtaactcactagaaatggatggaattaaggccaggcatggttggccaggctgctggacagtcctctccagaagaggagcccaccccggcctggaggatggacaccaggggctctccctctgcctccagccctcctgcttctcagtgtctaaatcatcagaaaaaaaatcatttctggttcattgacctttctgcaaattataatttacacccaagggtaaaatgtcatataacttttatgcatttagctgggctttttcactgctatcttaaaaaacaattctttatcaagacttcatgtcagaattgcacagggataattacctcaggagaaacgcttcatttgcataatgcaccatgcacatttccccttggggcagtgttgttgagggctggtgatatgcttctctggaagggggcattggtgaggcttggggatcggtcaaggacctcgtgaagtatcaatcacctccaaactgacttcattaccagcttttttccccagccacaaattaaatcatcagagtggatattggatgggcaggaatcttgacaaattcctgcaggacccggcccgctgtgtggcatcccttccctggctgtgggaggctccatggcccacactctccattggccctttcagagaaatggggtgtgctggagagtgggggccctgggctctttcctgctcaaggacagaagacagaaacctcacaacctccaccttcaggcacctcaccgtccaatgtgagagaaagaacaaactgagattgcacagagatttaggaagcctttgcagagaaacatacagacaagcacgccccaggccaagaagaaatggcagattattttggaagtatccattaaaattacttctttagatgcaggacctgctttggggttttttttctttgtaagtgacattgtatttattgcagaaaagaagccatggttggaaagtcaggactatctctcaatgctgtggaagggctgctgatgaacaacagagacgacctctagcccagcgtgctggtcatgccagccgccgtcatcagcactcactgctacacacatgttgacatatccttggcacagagcccactcatccttccagaagtgaggaaggatttcacctcctcaggcctctgaagttagaggcgaccacatgacttgtcttggccaatgaaatggaagcaggacccaggtgcatccccccaggaggggccttaccaggctgtgtctaatcccttgtggccagtctctgcactggccatcgtggaagcagaaaaacaagcctcttccactctgtcccaaggactctgcagggcagggcgcccccccaccccccacgcatgcacagtggacatgtcatgtgcatggaccagcatcacgctctgctctttcaagtgacaagatctgggagcagtttggtactcctaacccagcctgcactgacagatacaccctgaatttccaacaatgcctttcatccaaggaaagcagaaattttgtgggggtcccgtgatcacctcccctctaggacttctcagaccctctgatgtgcattgaaaatttccaagaagagagaagacgttcctgggacgatgctgttgtgacctgagagtatccgctgattctttcctcgtgctctttagaaacaggatttggatcaggaacggccaccacagacatcctgggtcctgcttgctttggactgacccctggctgaggaagaggacgctgtagaagacattagaaagtggaatggtgattttccttctgcacaagggcagacctcactcttcatcaccgatcaccatgagtctggtcatgtgtccccgactcccagaggatcagagtccttgtttttcccgaagaagtcctcagcaatatcctcacacggcttcatggagccctggtcagcctggagggaagtggacccttggtctcagtggtggctgctcccctgcccaagggcagcctcactgggtgaggagcccctgcacctcctccggacccccgtcctggctcctcagcaccgggcaggcccctcccggggccctctgagcaccgtgcgccatggggcaagcagtgcagctgccgtttaaatgagtgggttctggctctgtcgttttcctccccagggcctgcagcctcctccgggcttggcttccctttgctcaaggcagggttggcctgggccctgctgagggactgggcatgatgggcacctgagaccctaggagcttccatcctcactttacagataccccaagcacctgctcttctcgagggttccctgaacagctcaaaaatgcatgagaagtgaacgcacctgggacaagagggctgacagggagaggtttcctgggcagggctgtgcggtgcagagagaagagaaaatctatttgcatttcctgagttacttcttatttactctagaaaacatagttggcagccaaccagagtgtgtttacagagggatctgggctgggaaaattcagggtcatctttggattcagccctagaaacctggaagtgaacatgagccagacgtgcaagcggctggcggctccatgcggcaggtggggtgggtccccatgcagggggcacaggatggaggctccatgtggcaggggggtaggtccccatgcagggggcacaggatggaggctccatgtggcaggggggtaggtccccatgcagggggcacaggatggaggctccatgtggcaggggggtaggtccccatgcagggggcacagggtggaggctccatgcggcagggcgggtgggtccccatgcagggggcacaggatggaggctccatgtggcaggggggtgggtccccatgcagggggcacaggatggaggctccatgcggcaggcggggtgggtccccatacagggggcaggcagggcacagttgggtggacccagcgggctcctcactgccctgcccctgcttcaaggcagcatccaggcacttaccgtgccagcagcagggcagcctcagacaggagccagcatagccagcgcctgtgttgtaggtaccgcagttcagaaccccgtgtcccgccaagactccccatgaaggccctcacttagaaaactctggaatgtgtgagctgagtacagtgggctcagtgagaaagctcagccctgccccctgcactcccgtggagcccagaggtatttacccaaccacagcctcagagactgcagtgttggctctaccaaaacaaaggcccttccagacagaagaggcagcaggaagtggagagatgagggtgtctcctgctgccccttcgccccgaccccgggctgtactgtggccatcagggctgtccacttgggggcagcagtcaagatgggaagattctgtcttgtagtccttgcctcagtcaagatgggaagattctgtcttgtagtccttgcctctaaattttcctcctgatttgtacacctgcagtcaagggcagagggtaaaatattttctgtttgtgtatttgtttttaatttaaaaaagagagagggccaggcatagtggctcatgcatgcaatcccaacaccttgggaagctgaggcaggaggatcgcttgagcccagaagttcaagaccagcctgggcaacatagcatggccccatctcaacaaaaataattaaaaatgagcagggcatggtggcaggtatccgtggtcccggctacataggaggctgaggcaggagagtcacttggatgcaggagttcaagatggtactgagctatgattgtgccattgcactccagcctgggcgacagagtgagaccctgtctctaaaaaataaaaagtaaatttaaaaaggtggaggagtgaagaggagcctctgtggagtcagtgtgttgatgacactcatgtacacatttcctccacccattcctcctgcttcagggacatctgtggcaccgtccacctgcacacaccgcagcgtaggaagggccttgccccgcacacacctccccgagctggtcatagacagtgcacactgcacagtacacacgcacatgcataggcacctgcagctgggaagggccagagccaggacccaggtctggtctctctgcctggagtttcttcccctgtggcttcgcgctgcctgggagcagggagcactgttcccagtatcaacaggagctgccttcctgaagctcacctaggcctcagctctctttctctcagatgtttctgagagctttgagaggaaaaggaaattgtgactccctccagtctgaatggatgaaactgccacaggaatgctttttaaatacagaaaacaagaaacacccccaaattgcacttatgggaaatggagtgcaagcagaaaccaaccctggacgcccgtcaagagtcgcccctacctccacctctccagtgggctttcccatctgcagagagacacaaggggggaggaggccagaggtgagggaggggaaggcgaggaaggggagggctgggaggggaggtggcctctcaggacagcaaagagagctgtctctccacctgagccttaattgcaagtgatttcattagctcagtcctgatgtgcaaggcactaatgagggaggcttgcggctctagaaatagcctggccggtcctgtgtcttgtgtttgaaaggatccaccccagggcctggcttccctgagtcccagctatcagctccaacatctttctcaccacgtcacatggacaacgttcagatatgtgatgggagctttcagagacgacaggagccagcccccagccaccacgaccagggccctgcagtggggagagcatggcatggggatagtctcgggggggactgtggtgaaccctctccactcctgcagcaacaagtgtgtctgggtacccccagtggcccagggctgatgccacagaagaaacaggagccgaaaagcagctgggagccgccagtgaccattggcaccagcacaggccaggtgcctcatggtggagtgagttatcccatgagccaagcctggggtattctctgaggtgccctgcggtggtttctgcttgggaaccccctcctcaactgatacatcttgaaggcagagactacatttcggaaatcagggtgtgctgggtgtttatttctcagtgtgtccatatgtaaaatggggtgatagtagtcccagcctaagggcattgtggggacctagtgaggtgctctgtgtctcgagtttggtacattcccaggcatgtggtatgggccaagtaagcaagaactgccatcatcatcattatgccatcaccaccattgctgccatcatcaccatcactgccatcatcatcaccatcagtcccatcaccaccatcatgaccatcactgccatcatcaccatcagagccatcatcaccattggtgctatcatcatcaccatcgctgccatcatcaccattgctgccatcatcgtcaccatcggaggcatcaccattgctgccatcatcgtcaccattggtgccatcatcaccattgctgccatcatcaccatcactgccatcatcaccatcactgccatcatcatcaccatcggaggcatcaccattggtgccatcatcatcactatcagtgagatcatcatcaacattgctgccatcatcaccatcagagccattattaccatcagtgccatcatcgccaccataggtaccatcatcatcaccatcagagccatcaccattggtgctgccatcatcaccatcgctgctatcatcaccatcactgccatcttcaccattgctgccatcatcatcaccattggagccatcaccatcgttgccatcatcatcaccatcagagccatcatcaccatcagagtcatcatcatcaacactggagccatcatcaccatcagagtcatcatcttcaccaccggagccatcatcaccattgaagccatcaccatcagtgccatcatcatcaccatcagagtcatcatcatcaacactggagccatcatcaccatcagagccatcatcaccatcggtgccatcatcggtgccttcatcaccattggtaccatcatcatcagtgccatcactatctctcttatcaccattgctgccatcatcatcatctctgtcatcatcaccatcactgccaccatcatcatcatcactgccaatatcatatgcgttattattatcctttaccttagtccacctttattactttaaaggacaacctgaggctgggtaatttataaggaaaggaggtttaatcggctcacggttctgcaggctacacaggaagtatggcatgggcatctgcttctggcgagggcctcaggaagcttccactcatggcagaaggcaaaggagaccataggtgtgcagatcacgtggtgagagaggaggtgggagagttggaggtgccaggctcatttcaacaaccagttcccttgggagcttagagtgagaactccctccctcccttgagaatggcactagggaattcatgagacatctgtccccatgacccaaatgcctccccccgaccacccccagccacaaggcccacctccaaccctggggatccaatttccacaagacttagctgggccaaaccaaccatgaccacaccatggcattgctgtttgctgttagggctaaggagaggccttgcccaggttagaagcaggtgactcactcccagcagtgtaggaagcacctgcgcctcttcattatggaagaaagagctcagggccccttgggccacctcagtgagtgagatttagccagggcctgagcaggccacctaccctaggaggatccagagacctcagcacaccttttttctctctaaaccccatcagccatagaacctggcctctctgctttccaaggctgtgagtgagtgggctgctgtgttctgcagggggtgcttaacatctaagcataaccacctgtttatgagtagacatctgtgtgtgtcttgcatccaggaagctcttcatagcaaaagcatagggtggaagggagcagggtggtggaagatcacgtcactgttgacagggcaatgttatttagatggtgccttattctcatccttccatcctctaaaactctgcttgagtttgtctttcaaggaagggctcaagggccatgtctggaatgagcaggaaaggggagtgccaagcaacatgaggctcgtgagggtggggagtggcagtgagccagatgcccccaggtgagcactggcccaccatgccccagcggtggaacctcgggatacggggcaggatacctgtacctcagtttcctctttgggaaaatggaaggaacatgaccttccatataggtttgtgtgggttctgtaagagaatgtgctccaagtgcccagcaggatgtctgagcagacagtattgaatgaacggatgaatgtatgagtgaagattcaggaaacactggttcatgttggttcatgaaatgttagttccagatattcaataaaaatgtgacgtttttaagagttctaaaaataactcgcacttctccacaccgttaaatggactctcacagccttgaatgagagagcaaaagtcccagcaaggccaccccctccaggttcccaaggaacacccctagccatcaggacaccgctggccctgggagagagggacaaagggctttcctccctgcagtgactcagggcagcagcggtgccccgatgtcctggccaatgccgggaagaatgtcagtctccagccgtcctcgcccatgtgggaatgacaagcaaggctttgcccattagccctgttgctctgcgagcgctgactgcagcgtgttttgacaagaggccctggcatctcacaagcccaggagtcctcggtgcatggcgcattggtggctggatttgccactattattctctgctcactcctgtgttggcgtgagtgggaggacttcattagcgacatcgcccacatcaagagccactgtgcttcgttccagtgggcaccagtaggactggctaatgaggcgctcacagctcagtttctacggccactgtggaaaagaacttttgtgtaaatacctgcctcagaatgtggcccttccctgcggccccctcttctgtatctcccaatacacctgcactttttttcttgaacagagaactgttaattagtgccagaacctagagaaattcctctctttatataggctcagagccctttcacgacgtaaggctctttcgccacagcagggagctgcaaacaggcttgctgaggtcctttgaggagctgcgtctcctcttggcagagtctctggtttgcacatagcaccataaatattcaacaaagacgtggagacgatgagtgcaagttttgggggacagggccacaccggagagtgtaaggcacacacttgttgccatgttggctggcttttcttagacaggaagaatcccatggtattttctcatcagagagagatgcagtgtccatgaggatgtgagattacagcgttggatgcatcaagaagaaaagccagagggagacgcaagtttaatatttcctgccataaatgagacggcaagagagaggtttcactgttttactttataatgggatttctaacattccggagacagagtgttttgttttctttggagaaggtacagctgatagatagtgaatatccatttcttaatagactttggttttcagagcagttttaggtttatgggaaaatggagcaggaagtcacccccctctcccactgccagcttcccctgttgttaacgtcttgcattcgtgtgttgcatttgttaggactgacggacaatggaaaaataacatgtcagtaccgacgcgttattaggacacagtccaggctccaggagggctctgtcttggtgtggcggattcgtgggtttggacaaatgcatggtgggtttggaccaaatgcatggtgacacggagccaccactgcagacctcacagtgctgcttccctgcctgaaagtcccccatgccctcctgttcatccctccctcctcccacggtcctttcactgtctctgtggctttgccattttcagaatgtcatggagttggaatcctacgggtatgcaacctttcagatgggcgtctttcagttagcaacatgtccttaatgctcctccatgtctgggggcctgatagctcattggatatccatttttgaagctaagggaaatggaacttgtgcatttaccccattaagttttctcaagcacttcctgggtgccaaagtcacctggttggaaggtgccagagaccccggtgaggaaggcaggcccagcgcctgccagccccaggcccacagactggcaggaggtggccggcagtttcaggccctgcctgtgcttggagccagggtgaagccagccagggcaacctgagcagccatcagtggagacactcgactgcatccctgtgactgcaggagggacaggagcagatgagccttccagaaacgccagatctacttgctctgtgaggcagagattggtgctgggggcagggcctggctggggagaccactgggccatgcaggcagcgggctgagctgggcggcggggtctgggatggattgggtgtccagttggggtatccaggggctccggctcccacgtggaaggtagcaccccttcctgtggcagctccaggggaaggagcagctgagggggtctcaggcagcaagggtgtgctgtgtgggcagaccccagagacctcaccctggggtctggagttcaggagaaggatctgcaccgggagatgtcctggggcccatcacggcagggtcctctcatctgcagagcatgagggcgtccgagtccccccctcagccctcagccctgcccttggctctgctcaggccaaacagtcgtgccgcttgtggtgtgtcccattctgagggtctcctgagggattttggcctcgtgacattctcctcacccctcggccccccggcggcccctcacacgtgcccagtcaggttctgtgttcccgcagcacccttcctgaccgccaccctcctagatggttctgagcacagccctgcagccctgcatgagatccctgccaccccacaggggtatgctcagtcaggatgatctctttggaaagtgcacgccgtcccatcactcactgggcagggcccatagggtgcacctggagcctgggcaggtcccccccaggtggggtgaagcagaggcttcagggcagcctcagctcctccacatcctgctgctcagcagattcctgaggcagctgcatgtttgtagaatcggaaaagcgccgtttccagcgggacgcctcctgccaagcccagaactgcgcaggtgggttgggatgggcaggccccgtgcagacgctgccacatcatctgggaaatgctcccttggtttggagacgtgagtgagtggctcgtggggtagaaggttctcaaactgttgcaggtgtcctggcaccacgggggtgcggctgttcctccacccgactgtcacccccacgaggactcgggggctgcacagcctggcggggatgcctctactggagggtgtgtcccctgggatgagcaacatcagaacccaggttgccccacctgcacggtccccctacccacccactccccttaggagattctccttcatcaagaacctgagccagcgccaccaccttcagaaaccttggactcagactctgtcctctctctccctccttctcagcctcctctcccctctgggagctcctgctgcagtgacggtgactcactgctgggctggttcactccaaagtggctcgagtgcattactcaggtctttgcaataacccaagatttttctgtgtacaaaatatgcatatgcgtttgcctcccagcagcatctttcatgggagacagtggcttcctagcaagtcctggtgaagtgatggacatgaacactgtgatattccaaaccaacactcagtctctgcactgcctcagggaaaaggagcttttggagttcaagtcccagctctccaacctacaagtgtggaggtgaccgcgtgccttggaatcaaatccagaaatcgtactggggctcccggagcccacaggcactgccccatccctccctgcctcctcctcgctcccttcctgccccccagtctcctcccatcctcagatacactaagcatgcctcaggacccagggccttgcactgtctgttccctctgcggggaatgctcttccctcaggcaccaacacagccttccacctctcttcattcaggttggcctattggagaggggatgcctccctccagtggctccataacactacccctacctagccaggcacgtccagctgccagctcatcacgcatggtcccccactagacagcttcccgggggaggacctcggtgtgcaccgctcgtcccccacgcctgtgagagtgctcataggcgattcttgaatggataagtgggagaaaggaagaggctggaggttggagatgagccccccaccccatgtccctgtgttgcccgaggctttgatgtctcaggtagtcttgttccatttcgggcatctcaaagcagaagctgaatgtggcctccgccctgtgccacatgtgctgggagccccttcagcaccggctagagtgaccagctgggggcctaattctccccctctagaccccagctcccacctctgaaaacgggggtgctctgggctgtgtgggggcagcaggtgtgagatgacgcatggacagatggacaggaaagcagtggcccagggcgaggtggggaggtcaggggagggtgggaaagaagaagggcagtctcctgggacgctaggtgctcagttgctaccgctgctgatgtcgtttaggagggtctttggttgtttcaagggaattctctatgttccacacagagcaagttccgggcagtggcagccatttacatgcccaggggtctgcagttgtggtccacgcccaccaggttggatcccagcttctcccatcaccctcatcccactcacagccgccgctcccagtggttctgtacctccaggccttcacacgtgctgttcccgcatcaaagcactcttgctccgactttctgggtctgctcccccggtcacagaggcctcgggatgcatgcttcctcccccacagaccctctgctccctcatctcccctgctgtccctgtcacagtgactttgttcgtgggccggctgcctcatggtcttcccaccacactacatgccatgtgggctgactgcccagcacccaggacggtacgtagggaggaaatgggtacacgatggatggatgaatggaaggaaggaaggaaggacacagagaaagagagaaagaaaggaaagaagaaagaaagaatgaaagaaagaaagaaaaagaaaagaaaagaaagagcaagctggcaacctctgctggttgaacctgagggtttgaaactcaccctctcctcagcacggtcccagctacaagctcacctctggctcatttgatctttctcaattcacctaacaagaaaaacaataaaaaggtgtgttttgtaactgcagcaccattctcctgcatgcccgtcttggggagacacagcctgctgcgcccgtaaatgtcagcaggctcctgccgcagaggaagcggagcgcatgtcactcagggctggttcccagcgcaggctgtctcctggcccctttcacagagaagcaattagacagatgggggtaaagggttaacccggaagcctcctaatgaggggagctgccggctcctctgtgggtgcgcgatgccgagtctccacagaggctttggatccgcatcactgcacccgtcactgccgtgcacgcgtgagactgggggctggggggagatgtgaagtcacacactaagaaaattatttccttcatcttggaaaaacaaaagaagccgggctctgctgtttagctgagggtctaattatgactgctacatgtaatcctcggagttcagaactggcccaagcctgggcagggcccactgcacacttcccaggctcggaacggggagttgttgtatgtgaggtttgcaccagctgcaagctttgtgaatacacacaattcaaagaaaagcaccgtggcagtgcgcttgtgacatgctttgcattggggcatctactacacgggatctggaggtgcccagagccccagacggggagggacggccttggttgtgactctgggccccgcatggtgcagggattcaataagggtgtgggaaactgtttgaatagtgagaattcatcctaaaaggtagttttccttcagcaggttgagtttccctatcacccaaacaaggggctggagtagatcatttccaaggcccctcccagcctggcatgctgcaggcttggggccgtggggagctctggagactgagctcagcctcagcagtttctccctgtaccgccagttttctccgtccccacccagcacgtggacacagcgcacacaaagcgcgcacagtcacacgaatcaacctgggcagatattcaagaacctatgaatctccctcctgagtccccagggctgaggcccagcgcagacgatagcccccgctcccgagaatctccctgcgctgggtgggcctcgggcaggcgcctggtgatggctgttgctctgcggcccctccctgtggcccctcccggcaagcaccatcgtcttccccagggacaggaaaaacgacagaggggccagaaagagagaggggtcgtggaggagggaccctgccctgggctgatctggagatctctgtggggagaggaagctgtggccggcactcgggacccactccagggagatgtgtgagactcaggatgcggttggggccccgtgggcacagagctcaggaggactcccccgtctccccagcagctggaattagggaccccagaagctgcttttttaaaactgaagtaaaattcacataacgtaaatgtccccattttcaggcatacaattcagtggcattgagcacattcaaaatgctgggccaccgtcaccccaagggaaacctggtccccattagtgctcactcccccaccctcctctgtttcttatacccccctggtgggcagaacctgtggcaggtacaggaaggtgcctgcagggaccacagcccagcccaatgcagacccccaaggggttccccagggactcggggaccaagcacaggaaacctggggggccacagggaccctgaggttctgcctcccggccagcgccttcggggccactgcggggactgaggccacatctgccccctccgctggaccccgtgctccctgatgatggtgcccagggttggggcctccccacggcctccgtggctaacgggtctttgctgcaggaatggaggaatcgacttccctgacattcctctcttctttcttctttcttttctccttttcctggctcttgaatttctctgtccccagcagacgtgtctgagagcatgtgcatgcagcgggggccacagccttctgcctcgggggctgtgatcctctttgcagccaaatattgaggatgtgcttctgaagccaccgcaacagccttctaactcagctcccgagttgtttgcaaggctaggaaaggccgtagctctcttaacattgggccctaaagggggtgtctgggtgtggcttccactcaggacaccccctcagtcccagaggatgcgggacctcctgggagctcagggtgccccccactcctgtgcagatctctgagccttcttgcagtcaccaggtcagcagcctccatgcaacatctcctgggccagtccccaccccgaaggtgtaggttatctcgctggccgagggtcttcctgacaccatgctgtgttcattcttgtcacctcagctgcccctgttccggtcacaccagctctcaggtcctggaattcctcccttcctctgccccaggacctttgcaagtgccatcagcactaccaggaatgtgctccccacccgagccttctctggaacctcattccccagatgtccacggaagggtcctgttatcaaggaagccctccccacctgtccacccagcctgggtcaggctctcacagaacctgtgtcttccttgtagagtgccgcacgtctgatgtgatgacttggttaatgtctgtcctgccccacactctcagctccactggcagtctctgtgtctggtgtctgctgactggtggtatcagtgatatgtcatgcgaatggatgaaggggagagggagggaggaaggaaggagagggagggagggaggaaggaaggaaggagagagagagagagggagagagagggagagaggagcaagctgcccttcttcagctgtgcatatccagaggcgcattcacgacaggcggggtcccttcttaggggagcagaattggcatgagtcctgggagatggagccatcatgaggtcacccggggcgggggccacagaaactccatccacaacacaaccaagactggggtgacagagggagactaaggcccacattcacactgccgaagacgtgggtgacaggcgggggccagccgcatcccagcccggaaaggggaaggggagaccggaccaccctcagcctgtgctttgctctacagctgccaggagaaggtcgaggtgcaggggctcgccctgggacgagtcccaggctgttggattctctggtgtgcagcccttcctgggaaggtttgcctcagcattcgttgctcctcgtgttgcttggatggctttgcagatcctgctggatgctggccctgggggctgagccctgcctggcatttggtcatatttcagagtgggcaacagagggtggtccctggaggatgaaagatggagcagcttctgttctctggtgtcttctcagaagaaaacatgggctttaaaattaaatccatcttgtccagaacaggaggccagcggtatggggccaggttgcccagaacctcagaatctgttgaccccacaccttggggtgaggagagggagctgacccccagcagaacaagagatggatccccacaggctcagaatcccaagagccagctggccgcaaacaccctgcacggctccccatcccaccccagggacccccggcctgactagggcccttgtgtgaccccactgcagcctggagggcttggccatccatgctgtcatcacctggccactgaccaccctggcctcagcctgtgcggttcccggcagaccccggtgttcagtaagtgtttgtgggatggacgaccttgaccttgtgtgaccttggctgggtgccttgctccctggtgccatgtccatgccactgaaggatgccacagggcatactggccagagcataaggacagcagccgacatccacccagtgcctgccctatgccaggtactgagcaaagggatcaacatgctacctttgtccccctccccgagtccctgccatcactcccatttcacagaaacaaagactgtgctcagagagggaccaccgttcctcaaggtcacagagacaggaggctgtggttggtgtttgcaccccaagaccagggtaggtgtgcgcagggctgctggtgcacacccgccttgctgggcacatgcatacctgccccacagcgcatgcagcgggtgctgggaccctgaggttccatgcctgtggctctggtgtgaggacagcaggtgttcccctccccaccctctggggcccacctccttggggcaggcggtgccgggcctgaccccagggcccaatcctctgtgccacctccagcactggctttggggtctgcagcaaccaccgccagggggacagaggcaagggaggctccgactacatgtttaaacagttagatttaatttctctctggacccttctgtctcttgtcaagtttgtttaaaactaatggaagtaattagcaaaccatggagagatgcgtgcggcaggtagcggctgtgggtaccaggcaccaggcagtcccgtgtcggccgaggatggaacaggtaccctcctccccaggaggatttccctctgtggcacctgcatttcctcacaggtgttttctcccccgagaaacaactcttttgtcccccacagtactttctggggctgcagtgtccctagggcccaaggcagcaggctggtctgcggcttccctgcagaacccctgcattctgaggcagaggtgggggccaacaccccagcaggacctgaggggccatagccttggggattcctcggaggcacggcctggggtccagttcacacatcagctgcagaaggttccctcaggatgtgcaagtcagaagctccccacaccacaccaccgcccccatcctccaccaggcttggcatcctcccagcctcgggaagaaccaaccctgctggacgagggtgacagatccctgaagtcgggcagcaaaccccgctcctcctctcaccaccttcacggcaatcccgctcctcctctcaccaccttgacgaaggcgtgaaacgtccctgaggctcagcttcctatctgcgagatgggccagttctactcgccagcgctgccttcccgtgcctggcagtgcacccgccgcgtggaggctgcaggggctgggacaggacgtgtgatctgcattggggtcgcagaggcggcttttcagggcattgtaggtgtttgctggtacatcgagggaaaagttttctgggaatccattggatgttaattctctcctgaagactaatagagaaattgggagatcaaaaacaaatacataagaaaactaaacttccagccggggtggtgccactggtcactcgccttcacgcctgggcggctgctggcgcagtctcctctgggggctgtttcccatggggagggagttgcggggggtcccgtgaagattctgggctgagcacaaagcaggacagaagccccctttctgccctcagcctgatgggagccccggaccagcctggggaggctttgcccctacttcaccctgaccaggtgcctgatgctgtccggtcccaggacagcagccctgacctcagcacactcaccagtcctggggcgggagacacgggaggacatgggaatcccaggtacgaagccagggaatgaaacaaaaacaggtgatgtgaggggaggggtagggcaggttacaggtttccatgggagccaacatcccagccaggcctgagcactgggccagagccagctctgccagaaaccaccagttacaacctctgtgtccagtctgcagagtccagagtgcgggtcctggatggggctgaggcaccagattcctgcctagaggagggtgagtgacagcgggcttggagcccaggcccagttcagaaggtaaaactggaaggactgcccactgctggccagagccaaggttcaggcagacagcaggccgctcccggccgctgcagaggcgagggcagcacaggactccaagcgcccacagaaagttctataagcagttgggggcctctccagccgacgcctcaggctcagcctccagccacattcgtagagaggcaaagcagaatccaaataagtcagtgccaggcaacaccgtcaggagcgtcctctctgtacacggagaccctcagtgcatgccgacacccacacatacatgggcacttttctgttgtcctcctggaatgcatttaaccttgcagagacaggcgaagactccaaaaattaaaaaggaagcaaaaggaaggaagcaggttgaagaggaaacaaaggtgaaaagtagaatggaacgtgctgaggttagtaaatgtctcagcattgttagaaaagccagctacggtactgcctctgagcttcccagtagcctaagtaaagagggaaaccatttttaggcaattcacaaggaaagacaaataggatatggggaggagtccccatcccaagacctcagacatgtctcccttgaggctgccctgcacactcacttgccgtttctatagcatggcaaagtgttagtaacattctgggttgtgttcataggtacccacatttcacagagtttccaaacagattgttcatacattcagtgctaatgttctgtgaatgcccctggcgtctcagaagacttgccttattgctctttccttatgaaagaggccacagcctggtggggcacaggagcaggtattgaaggttctgaagctcctttcttctcctggaaagcaggtccccccaacaactggggtctctgaatgacccccccatcttccaggcctctctccaggagggtgtgggccagcaccatttgcgtaaccgtatcgtgacctttgtcccttgggctgcttccttctctaccagtgacaactcctgttttcctcctgattctccacggctgaggactcagaatcacaaatgctagtgggctgagtgttcagacacagaggtcgtgtttggagcggaacacccaagttatggttagactgaaacaggatgttgggactgcatcttgtcacaaagccctggagctttctcgtgattggacggggcctgttagacacagacggaaaaggcataaagatctaggaagttgccgggcacaggggctcacgcctgtaatcccaacattttgggaggccaaggcgggtggatcacctgaggtcaggagttcgagaccagcctggccaacgtggtgaaaccctgtctactaaacatacaagactcagctgggcatggtggtgcacgcctgtagtcccagctacttgggaggctgaggcagaagaattacttgaacctgggaggcggaggttgcaatgagccaagacggcaccacggcactccagcctgggcagcagagcaagactccatctcaaaaaacaacaacaacaacaaaatctagaaagccagtgtgcaggggccctggtgcggtcccccgggcatcacttccccaagccacccacggagctgcctttgagggcgctgtcatcagtttcatccagggtctctccggcagggaacgcctttcacctgcaaagtccttggttcatatggctgacgccaccgctgtttcctgcctggtcattcagacgttggtggcccattcgttctcaaagcagcttcaatgcttgcctaagatgtcaccaaagctgtgtgcctgtacttttttttttttgagaccgagtctcgctctgttgcgcaggctggagtgccatggcgtgatctcggctcactgcaagctcctcctcccaggttcacgccattcttctgcctcagcctcccgagtagctgggactacaggcacccgccaccacgcccggctaactttttgtatttttagtagagacggggtttcaccgtgttagccaggatggtctcgatcccctgacctcgtgatccaccctcctcggcctcccaaagtgctgttgggattacaggcatgagccaccacgcccagcctcccaaagtgctgagatgacaggcaggagccaccgcgcccagccgcctgtacttttttttaactacaacactgtgtttaatcctgaagacaacacaaaccctcctgctgctgtccaattgcattagttttattaggaatttgcttttagggaacaaaggggcttgtttgtgtgtttgtgctcatctctcagcaatcacagcactgtcatttttatctttgtcagtgacaatcagatgtcagaaatgattgatccactaagttgttgctgattttaatttgtttaccattgggcaaacagtactataaaagcagtttggaattttcctgtcacttcaaaaaaaaaaaatgtaatgattccgtccttagaaggggaacagatccggggagccacagcagacccttgcctgggttgatcctgtccatcagaggagccaccggggggctctggagtctggaagtttcattgctctgttgaaccagacagggtggaaatgcctggtgtcatcacatttaaaaacattttcacatgaaaatgtttcacatgaaacccacaagtaggaggtgccattggctgggaagatatctaaagtgaactattgagaagagggaacagacacgttatttattctttcaaggcaggcaacagtaaaaggtgaatgcgaggggaaaacactttatctaatgtaacagtgagtcgctttttttggtttctcgaataaatagtaattaaatcatgtaagctgtgacagcaaaattgcttgaaaaaccaatcctcccaccataattgcttagatacccacatttttataaataggagttaactttatccgtggcttttatgagcagaatgtgacacgggctgtgggtgcgtcgtaatttaccacggctgtaggtgacagttgcaaaagcacacgtctaaaaaatgcactaatgtgtccggatgaatctgcgcctctggaggtgtctttttctgcagcagaattagagatggccatgatgctggagccgtgaagggaggttggcatcctggtgcctactggttaatgttttggaagcgaagcaatgctcagcacccagcggtatcaatagactgtctgacttcaactctgtttccagttcaccaagaaagcacttggtggggccagggtctgccctggccacacctgcctagcccaccccaaggccatttgcaggcatcaggtctggcttaataataaaaaggaccagaaacacagcagagccgagttctgctgccagaatccacctgccatgggggaatggtccccagatgccagctctctcttgctccttccttgtacttagccttcttggagtggaaaaacaggtccattagtggcttcacagtctctgctggcaggaagaagatttgcataggcaagagtggggggaactgagggaatatttttgaggtggagaatacccactgtgccgctcacagactccggctgaattcggagataacagcggcaagggagagatgcgtttgcagaagggagtgcagctgtgttgtaaatagaatggaagctcagtgttgcttttcttcccccccttttttaaaggcctctggctaattctctagggggttgagataaaacacaccaccttctcgggaggtggagaaatcagtgcaaacctcatgcccctcatgcccactgggggcctgtagggcgtcctgcgtggttgctgccattgttaccgcccttctgctggccaagccgaccctgactctctccccctcctcttgcagtcaagttcagcagctgtgtggggaccaaggggacacaatatgagaccaacagcatggacttcaaagttggggcagatgggacagtcttcgccacccgggagctgcaggtcccctccgagcaggtggcgttcacggtgactgcatgggacagccagacagcagagaaatgggacgccgtggtgcggttgctggtggcccagacctcgtccccgcactctggacacaaggtaaggtgtgaccgcccgggtctgcgctggagtttagatgacctagttcctcctgcaggccctgggcagagcctctgccagggctcccacaggacagacagtcacctcctcctcgggctgtgccactcaggccattgccaaccaagcacccctgccctctgcactgacctgaggcagggccgtcattgcgggaaggccccctgggcaggcacacaggccccacactcaggttcagacactatgccacggtcttgtcgctcttcatatgtttttgaacaaggggccccaaattttcatttcaaactgggcactgcaaattctggaatctctcctacctcccgaagtttgtagtccaccaggcccagggcgttctgaagcctggagggatgagaagcaagcggagactgtgtggttggaaaggagccaaccagagagtggggaggcgatggagagaataacagagaggaaggcaggtgcagggagacagcaaaggagagggagaagagaatgagagagggatggggagaaagagagaagagaggtggagagagacaggaaaggagagggagggagaggaagagagggagagagagaaggagggagagagatggaaagaggtggagggagagagagaaggaaagggagggagaggaagagagggagagagagaaggagggagagagatggagagaggtggagggagagagagaaggaaagggaggggagaggaagagagggagagagagaaggagggagagagatggagagaggtggagggagagagagaaggaaagggagggagagagagagacagacagacagcttcacacagacataaaacatctgctgttcaggatcccagctgccctccgactctgcctccttctaacccggctgcctggctcacccgggtgacagggaggggcgccttcaccatgccctgtcctgaggctccctttcatcctggcatattccagcaatccagcaccaggctcctgaacaacctgcgttcatccccagttctagctgttaggttccccgtgcctgacggggaagtggccaggtccccttcgccttgagtgtcctggcgttggttgcagccactgcgccagccttcaggtgtggaggctgctgaagaagctgcaaccaggcggcctgtgggagagcactaaggaaggccagcctgcaggtccagctgttgcagctgcctgcctgaggggccccagtggtggaaagaatgtgtgccaacccctccagatccccccagttaacatgaggcctctatggggtcgtttgagatacggtgagcaaaggaaatcaccacgcaaggcggcggccactagcaatcatgggcactccctcggaaaagggccctcgggaagtaaagcgttaagcagaggcaagcagattcctttccgtgggtttcccagaacctcatgactcatgtgctgtgtaagcctctgagtgagaccagtctgcaagtttccccaaactgtctgaccaaggaacccttctccatggaaagcttgcaagacaggtgtgccaaggaacccactttgggaagggagggacctgtgtcttcttctgacttgtttctcagatggaagcggagatggaagcggaggtggtttaggttagaaaagagaaagtgtgactcagatggacagtcttcactgcatgatgagctgaccccacgggggaaggaggtcttgagagtcctcctgagtgtgttaaaccaagcagcagagcacgcctctaacggcagtggcccccaaatcatgagccccacctgtgagtcctgacgagtctaggacggtgtatgtcattttccttcttccctgagtgattattacaagccacgccctggtgagcaaggcaggcccttggacagcctggggaccctgtcccatgggggtcccttccctccctgagctgtgccgggacactgacaggcagggactttcatccccatcatgcctgtgacttccaagctgtccccaagtccccgattgtgagccgagagcagagcccctgagagccttccaaggcctccgataaaggctctaattgaaaatataatgacaccttttcttgggcatgttaatgaagcgatttcagatttaatcccctgatcctctgcagaaggggcaggcccagctgtggttgccgctagacagtccccgtgggaatgtgcctcgacccacaccaggctggtgcaggaagcacccaaccagcggagcaggggacactgaattcatgtcccaggctcagcgcaccctggggagcccagatgttaaaccaggcagcagagcgtgcctctaacagcagtggcccccaaatcgtgagccccacctgtgagtccggcgtatgtcgttttcgtactttcctgagtgattattacaagccacgccctggtgaacaaggcaggcccttgggcagcctgaggaccctgtcccatgggggccatggggtcactgtggggcacagccctgagtccctgagacatgactgttgcagggcacagtgggcagtctctgcagcccaggagacccggtcctccagcgcttttgttgccaatggttcctctcctgactttctagcacccactcagaccttgccccaagtggtgtaggctcatctaaccctctccacacccctggaagtgggtgctgttacatcatggatgagggtgctgagcatgtgaccacagccctgtgctgcacaggagaactgatgtgtggggaaggagtggaaaaggactttgcaggtatggcagagcccggcatggcgcaagagcagccacccagggtgtgggtgcacggcaaggcttctgcgacttactggctgggtgttttgggagaattcacacaactttgaggtgaactgctctggagaatgggagagtaatgctacccatgtcccagccaaagggtgctggtatttcatgaggttatggaggtcaggaggtggaaaacagcagcgcatatggctgtcattgcctggttccaggcttcacagtcctgtgcttatcacagtgctgggccttgccaggtggcatgggggcaggaggaggcaggcagggagtgggggtcactgtgggacgctgggccacctggttgatgcgcccttacagagcgtgatgccagcctctatagatgatcaaggtgacaccggattgctggtgtcctggccgcctgccagaagcaactgtgcatctcccccagtgtgaactgtcacccaggccttcagctgtgcccatctcctttcatattcaacgtccagcactcggcctcatgactgggcacatgaggagggacaagacatagaaagaacaatcgaaagaagaggcagataagaaaggacccacagggaccgggcgcggtggctcacgcctgtaatctgagcattttgggaggccgaggcgggcggatcatgaggttaggagatcgagaccatctggctaacacggtgaaactctgtctctactaaaaatacaaacaaaaataaaattagccgggcgtagtggcaggtgcctatagtcccagatcctcgagaagctgaggcaggagaatggcatgaacctgggaggcggagctcgcagtgagccgagtgagccaccgcactccagcctaggcaacagagtgagactctgtctcaaaaaaaaaaaaaaaaaaagacccacagaggctccagagcatggggcaatcagagagattttacactaactacacttactatctttaagcaaattaaatagaagactttgagagataattagaaggtataaaacagaattcttaatcgttgggcagtttggaattgaaaactaaaccaaacaaaatgaagagctcaatggatacatatatctgcagatttgacatagctgaagaattagtgaagcaaaatatatcaaaaacattcgtgctctaaagcgtgaagagatacacagaaggaaaatacagaagcaaccgtaagagatattagagaggcagtaagaaggtctaatgtgtatatttgcaatatgagggggagagagaaaatggggcagaagtaatatttgaaaatatagtggcagaaaatattccaaaactgataacattcatttaggcatggattcaagaagccctgtgaactctatgcaggagaaatatttaaaaaaaaaaacagcacctggatgctttatagtaaaatagttagaacccaaagacaaagaggaaatctcaaaagcagacagaaaaggcagaattcctttgaggaagcaatgactaggaggctgacttctccgcaggagctggggcgttgtgggggggttggaagaccgttccattccatgccattgaatgatttcttttcttttttttgagacagagtctcgctctgttgcccagactgcagtgcagtggcgcaatctcagctcactgcaacctccacctcccgggtttaagtgattctcctgcctcagcctcctgagtagctgggatcacaggtgtgtgccaccatgaccagctaatttttgtatttttagtagagatggggtttcaccgtgttggccaggctggtctggatctcttaatctcgtgatctgcctgcctcggcctcccaaggaatatcttaaaagtgctaaaagaaaatagaattctatcatccagtaaaactgtctttcaggaagtaaagttgaatgaagagaaactgaaagaatctgtcccaaatgatgttcttcaaacaaaaataaaacaagttgaggtgaacactcagaaatggaggaaagaatgaagagctgggaaaaggccaagaacactgaaaaatacaaatgaatcacagcagtgtaatgtttcatgggtgtaaacagagaactcgaatttacagcaaaaactgcataaactttgagaagggataaatggaatcaaagagatagaagttgtttgcatttttctcaaaaatgatggaaataacaaattaatattactcctaaataagacgaaaatacttgttataaagtctttagaaaatcactaaaagagtcataaaagtctgtaagtagtaacgtaataaaaggaaaaaatagaataataaaaattatcaagccaaaaaatgcaaaaaagagaaatgaaaacagaatagatgggctacacatttctctttgttgtaatttaaaaaattgatggataaagataaatccaactatatgcagtttgtaaaagatatacctaaaaggtataaggctaaagtttagcagtaaaatcctagagaaataaataccatgcaagtaccaatcaaaaggaagctagtggactctgttaatatcagatgaatagaatctgaggaaaaagcattctattcaaggaggaacacttcgtaatgataaataattcaccaagaagatacaggaatcctaaatttgtgtgcacttaataatatgacttcaaaatatttatgccaaaattgatagaaataaaaggagaagtaactatgcaatcagtggtcaattttaacaaaatttcttagcaaataatagaacaagcagaaaatatcagtaaggaaatagattagaatcacacaattaacaggtctggctttactgagacatataaaagcacagaaaccaaccactgctaaatacacatgatttttaagtatagacagaacatttacaaatattaaccaagcaagtcccaacatacttcatagccttcaagcaattctcaacatacttcaaaggtttaaaatcaaaacatagtttgttttcttaactcagagcaagtaggctagaaatcaataacaaagaatgtaactggaaaatccccatagatttagaagttaagtaaaagccttctcattaacccttgggcaggaaaaaaaaaaatcacatggaaattagtgaatattttgaactgagtaataaaactactgggatgtagctaaagtcatgcccagatggaaatgtttagccttaaatgcatatattacaagataaagaaggcagaaaattggctgggcgtggtggctcgtgcctgtaatcccagcgctttgggaggccaaggcaggtggatcacctgaggtcaggagcttgagcccagcccagccaacgtggtgaaaccctgtctctactaaacatgcaaaagttagccaggcatggtggcacgcccctgtaatcccagctgctcaggaggctgaggcaggagaattgctcgaacccaggggacagaggttgcagtgagctgagattgcaccactgcactctagcctgggcaacacagcaagaccctatcaaaaaaaaagggcagaaaatcaacaatccaggcattcatctcaagaaactataaaaataactgaaaatgagacccaaagtctaaagaaagaaattgttaaaacaggaggagaaaacaatgaaacagaaaacaatagaaataacaaaattggtcctttaaactacaaggctgatcagactgagcaaaaagaaaaggtataaactgcaactaatccttatcaggaatgaaaagatgacatcatgactaatctcatggacgtcagaaagatcatttggggatattatatacaatttataccaatacacttaaaaatatacatgaaaaggataatagtgtagaaatatacaccttaccaaactaacataagaaaaaatcctgcactgttttattgttacaaacaaaactaaaatccttatcacaaagaactgtccacacctgttggctccactagtaagttctacccaagctgtcaggaaaaattaaaacaaatcttacacaaacctatccaaagattacaaaaagaggaattgctctcccaaagttttgtcctcccaaatccttatagggaggatacacacactggaggtacaagccaatgcagtaaggcaagaaaaagaaattagaataaatgaaactgacattatttgtagcttatatgattatgaatgttagaaaatgtaatctgtcctaaaagaacctgtactaagttactgggactcgtgagtaaggttagcaagggtgctggatgtaatagttgtacttctatgtaccagggataaatccttagaaaataaaatctgaactagatcccaattacaatagcattaaaaacgatcatataactgggaataaatctaacaaaaatgtacaagacttcttacattttgttgagaaaaattaaagaactataaaaatggagggatatgctgagctcataacttggaaggcttatgttagaatattgattctacccaaagttgccatagagtcaacacaacctcaataaaaattccagcagattttttgtttgctcgtttcgggaagagtaaagagctgacttaaaattttttaatggaaatggaaagggcgaaggtagcctagaacaagaaaaagatgggaggacacatccttccagacaagttgttggggctgtcctgtgtgctacaggatagtaagccagactcctggcctctacccactaaacgccaggtaaagccccataacctccatatgcaaccaaagctctttccagccactgccaaatgttccctggggggcaaaactgcccccttttgagaaccactgaactacagccattaaaacggtgtcattttgaagcaaagatgattagatagacacttggaacaaaaataatgagcccagaaaaagacatgtaatgtgtttaaaaatcagcttcatggacgtataactctcatactacaaaatccacccagttcatctttacaatctgatgagccttgtcaaatgcccagggtgcagacgcttgattttttattataagagcagtgctgtagagcaggtgccagcatgctgtagcccacaggccttttatggccagcaagctaagactggtttttacatttttaaatggttccattttaaagggttatgtaagtacctatacgatgtcctcaattttgccccttaacctgagatgcctaaaatatttaccatctggccatttgggggaaagtttgcccatttctacagaaacaacagaggaaagactgtcttttcaataaatgatgctgggccaatggggcatctttaagaaaaaagtaaaatgacccctacctcacaccacaaccaaaatccatttgaggtggactgaaaacctaaacaggaaaggcaaagcaatgcagctgggagtgaactgacccccgggtgtggaaagcttcctcgcacatggcacgtgaagcgtgaaacacgggaaagaatgatcactggactttattaaaaataagaacttctgccaggtgcggtggctcacgcctgtaatcccagcactttgggaggccaaggtgggcagatcacccaaggtcaggagttcgagaccagcctggctaacatggtgaaaccctgtctccactaaaaatacaaaaattagctaggcatggtggtgcacacctgtaatcccagctactagggagtctcaaacaggagaatcacttgagcccgagaggtagaggttgcagtgagctgagatcatgccactgcactccagcctgggcaacagagcaaaagcctgtcaaaaaaaaaaaaaaaaaaaaagaacttctgatcatcaaaacatatatcttaaaaatgagacaataaggcagagtctgggaaaggacatttgcagcactcgtatactcttgatgggagtgtacaatggtacaaacactttagacagcaattcagaattactattaaagtcaaatatacatatgcctcgtttttggtgtatgcccatagcagtataggcaggtaataccaagaactctgtacgggacgttaagagaaatcttacgcataatcaccaaaagctggaaacaacacacatgccctcaccattgcaatgagtcaataaattgcagtgggctcctaaagtggaatattatacggcagtaaaagtgaacaaactgcagctagaagcaacaaagccagcgaatctcacaaacagaccaaagaaggagagcaggcaggtgcctggcagcaggaacacgtgtcagccgagtgaccgcactcccatgaagtccaaattcgggtggcactgaggtgcagagttacagtcggttgagggttcctttcagggggcagcaggaagccatgctgggggacaccagagggtgggagggagtcttgtggcaagacaggtgctcattctgccatcatttttttagctggtgttctgtacgctgttgtacttatagtctattactcacaatttaatttttttaaacaaatgcatgcagagggctacctaactgtgtttagagaaggtgggagttctgatgggggcacgtggtaagcaagagttctgctggcagaaggttctggagaaacaaatggcctccttcaaagcatcagtttacagagcgctgggagtcccagggcagtgtttattgagaggagcctggaagcagattctgccagggcaggtgcatggggacccctaatttcctggttctgtaaatttcatttctcttatgtcgaggtttcttcaagtgccgcctcctctgtccattattttagcgactctggggagctgggtaaaactgacagctttacagttagatgaaccataaaaatttggcaacttttctccttcttttgtcgccctctcttagcaactatttaaaagcagcctttctgtgggcaatgcaggcagtgctggaatctggaagaactgttttttggtgcagtcttgcaggaaagctgatagcaattcaattaggaaatgcaaatgaggtcacatatttcccaccggagggctgagtcacccctgaggaatcagagcaatattctggcctcacaggaaacactcgagaccaagctctcacccagttgtcatctgactagctgctgcagcactgaaaagtggcaataggacctgtgggtatggtttgcaaaaaaagaaactgttgtttatgaaactaatattgtatcttctagcacacgtcagcgtttatgaggatgaactcggccgagcaatgtcccacggccaggcgggtccaggcgctgacctgtggactttcctgggtgtttctgtccccccaggtcctttgggctgaactatgtcccctaaaattcaggtattgaaatcctaacctcagaacatgacttaacttggaaatagggggtttgccgatgtaattagtgaagaagaagtgattagcgtgggccctgatgcagtaggactgtgtccttatagaaggggaaatttgggcacagacaggcacagggagaagtcctgtgaagatgaggcagagagctgggggatgccttcaaaagccaaggatcagggaagattgtggcaccaccaggagccaggagagacgcccagagcagattctcctgcacagcctcccagggaccagtgctgcaacatcttgattttggacttctggcctccagagctgttaagggaataaatctctgtctcagcccactggcttgtggaccagagcctttcagccgaggtggagactcagatggcagagtgcagacagaccccaaggcatccccgaaggcagggaggagtgtccccagccaggggtcccgcccagggctccaaatacccctgaatcctcttgatgcagccactcttccctccagggctgttgaggacaagtccccgcccacggcagcccccaggtccctctgctgctacccaggcccttccactgcccctgctgtccccctgcccactgcaggctccacagggcttggggtgtccctggggagaggagggatgaggaacgggtgccattccaagggcagcagcacacaacaggtgcaggcacactgcccggaacaccacacacacggtgcacggcacacacaccacacacacacgccccacacaccacacgcacacacgccccgcacacactatgcacaccacacacacagtgcatgccacacacaccgcacacacactgcacgccccgcacacactatgcacaccacacacacagtgcatgccacacacaccacacacacactgcacgccacacacaccacacacacgatgcatgccacacaccacacacatgccccacacacaccacacagtgcacgccacacacaccacacatataccctgcacataccacacacagagtgcgtgcctgtattagtccgttttcacactactgataaagacatactcgagactgggaagaaaaagaggtttagttggacttacagttccacatggctgtgaggcctcagaattatggcaggaggcaaaaggcgtttcttacattacagcagcaaaagaaaatgaggaagaagcaaaatgaaaacccctgataaacccatcagatcttgtgagacttattcactatcacgagaatagcacgggaaagactggccccggtgattcaattgcctccccctgggttcctcccacaacacgtgagaattctgggatatacaatgtaagatgagatttgggtggggacacagccaaaccatatcaataccacacacacacacacgccccacacacaccacacacacagtgcacaccgcacacacactgccttgtaacaccacacacatagtgcatgccacacacaccacacacacacacacacacacgccccatgcacaccacacacaccatacacacagtgcacgtcacacaccacacacacacaccccgtacacaccacacacacaccatacacacagtgcacatcacacaccacacacacacatgccccatacacaccacacacaccatatacacagtgcatgctgcacacacccacacacatgccccatacacaccacacacaccacatacacagtgcatgctgcacacacccacacacatgccccacacaccacacacacggagcatgtcacacatgccccacacaccatatacaccacacacagtacattttataccacatacatgaatcgcatggacataccacatacactgcacacactacatgccacacacactacacacatatacacaccacacacacacaccacacatttacacgtacgcacattccacacagtacacacgtgcggctacatgaaacacatgcgcaggtgttgcacactcacactgataccaaactcagtctgaaaaagagttctgtgtatggtcagcagcaaaggacccagcacttcacagggttggatgcggccacccaactgcatcaccccaggctcacttggggtgttcaccacgcccagcccgtgccccccatgctcacgttcccactgcagggcaggctgcgccactgtgtccactgtgggccgagctctcatgccttctcctctgcacattctgatgaatcacagacagcctaagagcacatggaggaggtgcaggcttcgttagcgtgaacgcaccccctgggctgtggtgccagagctcagagcaggatgtctggagtctgcatcctgggcctgcacctgagctcctctcaaccctggccaggggctcggcttctccttgcctccgatctgcatttgtatgctgggggctgtgggactgtcacagaatgagaggggttgctgagctgtggaggtggggcccacaggcagctgttagcaaacgtcaggtgtgtcactgtagagcacgtgcaaaggctggagcagggagctcaggagaggcctaggccagggtgaactctctcctgcacaggcctgtcccccactactcacatggtccatatcccctatcccccaggcccatccccccatccccctggcccatcaccccatcccctggaccctccctcatccccgggtccctcccccatcccctggtccctccccccatctcctggagaagcctggatatgaatcacttcttgcccttcaccctgagagcggaggccttgtaagtgaggctggcattgcagggaagcatccacagactgcattcctccgtgagttccccagggctggctggccagtttctgatctgaacctggacacctgagcatttgagaactttaactgaagggggctacaggtcatcagggcagtgaggggatggtcccccagggctctccacatgagctgtttctgcagaaggcatatctgccttgggaaagcaactagaaggtcccgaggtgggggtccaagtttgaagctcacatctccagaaaatggtggtttgttttatccttctcccaaaaggtggccctcaacgggactgaaaaacagcaattctagaataaataaacagcaacagtgccgttggcaaacttgtagacaacgtgtccacctcctggctttgttttgaagatgacgagctattttaatgagtgtgaataacctccacgctcctgcaagttcagacaccgtcaccagcagaggtctggctgctcaggtgcagattccatggcccctgggttcagcagagcgtgtattggtatctccacgcgtgtttctccacatcagaacacagaccccccccccagccccctccagggggctcgagtttcgggggtggtgggccgtcagtattaggtttcatggccgtccaatgcaccccaaaggaacggcagcttgtaactcttcatgggtgcgaaggacgggagtgactattggaattggtcttgcttctttcaggcctgagaagttcaaacttagccagtgttttcaggctgcaaacagccttgaacgacatctgggccagcccttcacttgtaaatagaggggtgcccagggccccaggggcagtcagctgcaggggcggccccagactccccaggaccaggcagggaagccccctagggagcaaaatctgatgggttattggtcattttccccaggccatcctggtgggagaagggcagacctcagtgcagacactgccagggtcactgtcccaagaagatctgaaggggattgagcccgtggtgacctggaaggtggcttggtgaagattcttgctgccatgtggagggtgtcagggataaaagtgggccatgccggcagggaggctctggtcacgtgagccgtggagggaggagcgagtggtacagactctgtgtcacctcctaccccagaggcatggccacaggactggacctgagtggtagccatgcctctgaggaccttggagtcccatgggctgggaagatctggaagtcactgtctttgttcactccaggagtgatgctgggcattcacgtgtcccggcactgctgtgtagcagctctctctaagacttggggacacgacagaggacgctgcaatgtggtccccgccctcaccgagcttaccttctctcggggcaggcaggccaggtgtccatgtggcagatgcggtttggcaaatgctgtgcaggcacattcagagtcaggtgaggggtaccaagccccgggacaggtggacagagggtagaggcgctgtttcatccaggggtgcaggatgttgacatccaagttgagaggtgatgtatgggaagaagccagccgtgaaaaaattcccgtgggaggagtgttccagacagagggaacagcagatgcaaagagccaagccaggccagccccagtcacaacgtaattactcagtgctccactgtgggatgtgtgctctgcctcgggccctgggccctgcccgtattgtggtgctgtggataggctgtacgttctgcatggttgactcatttgctgtctgtcctgacgcaatcggaggctcaagggctttcccagaattgccacgaggagttaggggcagaggggcactgagagagagccccggggtgaatctgcctctgcccacctcccagccaaggatgtctctgatccgtctgcaaaataaggaccacgaggtccgtgaagttgtcctgagggcatgacctcaggactgcacgtggcaccgcgtcccatgtacagtgacggtccccctgagccgtggccactctaaccccagctccatgtctgtctgggccagtcagtccaagacttggcctcctgacgggggacgagcccacctgcccgcctcccctgcaggcctgtgcaggctgggagctgagagggcgcacaggcgtggtgcggggcaggcacacgggccctccagcgtctcagcttctagcacagtcaggttctgcttgggccgttagctctcgactagagctggtgtgtgtgtgcacctgtgtgcatgggtgtacacatgtatatgagtgtgcacatgtgcgcatgggtgtgcacatgggtgtgcacgtgtatgcccacttgtgagtatatgtgtgtgcacatgtgtgcgttcgcacatgggatgtgtgtgcacgcatgtgcatatttgtgcatgcatgtgtgcgcacacacgtctatatacacactttggggagcctgttcagagccccccaagcagagttgtgaggggccagtgctgccctcctgcaggtgatgaaagtaaaactgaaggcagacttctcagaccaatacgtttgtgtttcactccaaggccatggctctcatttaatatttggttaaaaataaaaccctctgtggttctggagaaggattttgtgaaaacagtgagaaaggggtcatggacacagtcttttgtagctggcagaaagattcccagcaagaacaggggtgtctgtgagactgaaacgccacatggtggacgacagatccatgaagccggaggtccccaggggactcttcagaggacatgtcactgagggtctgggcgccagggctctggatggagcgtttatcgcggtcctcaccaacgtcttcccgaatcacacacgctgatggcaccgaccatctttctcactaatgcacaaaatatgaacgatttcattcagttccaccactaatgactctgggaaaaagtaatacattttcccttaacttgctaatttaatttaattttttttttactatgaatatatttttctataaactggagggtaattttgtttaaggtgtttctaactaaacataattttcctgattctctagagcaagttgttctcagccagggcactaggcgagacccgagacgcctgtggttgtcaccacagtggggttgctcgtgagttgggtgcagcctggcatgctgctcagcatcctacagaacccaggacgccccaaacaaagaaggattcagcccaaagtgttaggaatgccgaggttgagaaacctggtctaaagccaggggtgcagcccggccaggaccgaggtcacaagctcggtagcttgtccggatctctttgtaccagaacattctggaacctcctttcttctgctagacagaaatacttatcaacacccttaaagaggctgacatcagaacacacatgccacctgctctcttgtcagccacaattccttatccttctgtatcttcgcttttggtgggaggcaaggctgaagggtagggggagggggtgggtggctttgagatcttcatccagagaaacgtggtggttacgtggtttgtgaggctaattaggaacaacatgaaacccctccacggggtgatggtaattgttacaagttgcctaaagaaccaactctaaactttcccccaggacagcccaggccctcagaagtcatagcccaggctccggctttgcccacaggtgcgcggggagaggggtcccaggactgcagcgtgctgggtgatcctccatgctctgtgtcctgtgagaggaggaacggtgagggctgagagcccaggctccaggggccatggcctgagttccaactggcctccagaggacagcagcatgacgctgggcaggtcgtgcaacctccctgggtaaaaatgaaggtgctggcttcccgcccctactccatcctgggggcactgagcccagacctcggtgcaccgacaccatggcagcaagccatgagcctccctgctgaggctttccttccaaatggacacagtgaagaaataactgcccgactgtgttcaggaaacctttccttgtattatttctatgggaattttcaaaatgatgtcgcctttttatgagagatcagaagtaagaaattcggtggtgctcgtggggcagggagagtgggtttggcccctactggtgtcattgatgtaagaaaaaaatccactaagtgccttttcggaatgaaactcatgcaaatgctgacttacaatggctcacatgttctatttgtgaaagaatgtagatattgttctgttgttttagtgtgtgtttgttgaataccattttattccgtccatccttagctaccatggaaaccagctagaaggctgcagacaatatcctagttaaatattttaaatatacatgttttcggggaagcaaaatggaccctttctcaaaggtacaccgaaaaggaaataggaggtagaggaatgaactctgtgtaggatttagggcacccccttttttaaaagaaatctaatcatcctcagtaaatatccgtactaggtttgacatttaggggaggggggctcacataatttccttttgaagcatgtttaacccaaagctataaggaagcaatgagaacaggaagactgcgaatcagagagattgaaaagagccataaatagaattgatatttggggaagaaatcgtatcctccctgttccaacagagcaatgtacgttcataatgcaggcatggccggtccttccccagatgtttcatttccacggcagactcctatgcaatcgatagtcttggagcactagactctaagacgtggtgtgtgtgtggctggggtcagccacatatttacccaaacattagaacgttcagcaaaacaggagccgaaaatgcactatgaggtggtgccatgggtccgtggtcactgccacaggagaagctgccaacacccgggagcctgaggctagacaaagtcaaaggccggtggctttggggacagaggtgctgggtggctgggactgcagtgcacagaggggtgagcgcggattttgttagtgaataacgcgcagaagacgccgtggcctcagcagggctccgggacctacatagggtttcagagctcccagaaccttccatcctgagagtgctcttctccctgcatccccagacagagcacctttcctctcacaggaagctccagtgcatggagcatcctcataagccatgccgacagctccgcacagcaggcagctccgcacagcaggcagcgccgcacggcaggcagctccgcacagcaggaccaggttagagggctgggcgcaaggaaaagctgcaatgctttgcctttgcagccagtccagcctcaaggccaccccagggcccacctggctctgctgtggggataggccaggaggcaggagctcccctgcgctgtttccctgggccatccagtctgcaggtggtggacttccccaagtcagagtaagaccgtttcgtaggcactctctagtgacacctccgagatctgttctgtgcccatcaccattctacacagtcacgaggcatgttggaaacagaatgaaatccacaagttagatgcatcttatgcctgacgtgaccacacagcgggactggccagcatctggtatgtaaaaaagttctgctctctgagctgaattctctcatgatgattaactttctcattcacaccaaaaaccatcttcaatacccactgttcacccacatttccacttctggagacatttgccacctctatttttatcttcacagaaaaggagggctctgttttccccacatggctcacaggggtgtgtggagcagatccagcagaattcccagctcggggctgttgcaaatattcttctcttccttggtggaatggctcccactgcactctgtccagcctggaagacaaggagaggcagcaaaatcagggaagtgaagaagcacaatcccctctgtgtcctctcaccgttccttgacactgggtctagtttatctgcttatacaaatcggacccccaggctctgcagctacagaagccttgtctctcagcattgcgggttcacagggctatgctgcctatcagagaaatccagtggcatggggacctccccaaagagccactttcttgggtaatgagagccagcagttacacctttccaggagggggacaggtgcaccccaacaagctgacacagagcaccttgaccatggcaacagccagtacggtgaccagaggtcatgtcccagcagaaactgatttgaaaacattcccatagatgcttttgtggaatcaggtggacttgtgccatgccattttctcaacactgtggggcacttcagatgctaaggacatgtccagcaggatcagtgcaggacctggccgctgggcgggatgacaagtgagggatgccaccaccgccatctgtgacctatcgccaaaggtcggggctgccggcttcccttagaaatataccacggatctggtgtcagggaatttgaagcaatttccatgtttttgccatctcttgagggtaatgacttcgactaggacaagggatgctcgctcttcctcactgaacttggcaggagcatcagatggccccccacaactaataacccatgctcagggaacccaggccctgttcccctcttccatctgcaccacgctggggttttgatcaggtccaccccatctcagcccatctattcaagaggactgctctggcatctgtgcctctgggaggcattttcacgcaatggctacggcactgcggagccggtgctcagttcaggattcccagggagctcgtccaccctgcagagagcctcatgcaatgtgtccagagggtctggagtgggacctgctatctgcatctctaccacaaggaaatgttacaatagttgatcaccattcacctgtgaaccagctcccatgccccggccagaccacgattgtggggaaagacccctcgtcttccatggaaggcactctgggagtttctgcatggaagccgggtcttggtggctgccctcccccatgtggcttcacctctgagtgttttagcattcccttcacttaaaagccagggttcctccttggctcttcataattcccggctcctaacagatgcgtggattcgagaataaaaaatataacaaatgataacttttcgcatgtagcttgggaggtgcatatgattatattctttccttaacactgtttttttctttttcaaaaaaacagaaaaagacgatcatgtaaagcctgccccaggtcagttttgcattctttgtctctcgcttgcgagtgatgaggggagggaaatgatccgagttttgctgatactgagctgtccctggagacctcaccttgcagccacagccagttacagcctcatcacacagacaggagagcaagacccaggcggggagcagggctgccaggagcttaagaaaataaaatattgtggccccaagaagccggcagggcagaatccggccctggggagagcacaggccgccgcagggtgcaggtgtggacttgggggctagtgtggttttctcaacatgcaccttgcccgtgaaccccggggccaccgacttccagtcgaacggaagttgtctttgtctgtgtgccttccttttgtctcttaagctcatttacctctcatcacttcccctgaatcacaatttatgtattcttgaatgtgagggattggtgactgtatccctgggaagagagaggatgcctgtatttgagattggtccaggaagcctgtacagagagacccggggctggagaagagttcatccagaaagaccatgagaccacccagacccctcgagccatgggtggagagtgaacacaccttccgcgcagggccccccgagcagcccactggagcccaggctgtcattttatctctaaaaagccaagctccacttatgcatggggctttgtcgtgcatccgccccatcagtggcagttttgcagcaccttcctccccagatgtaaagtgaagcttccgctccccaaggcgccccagccttcggcttctaacatcactcctatccccactgctgcccacatcccaggcatccacgtagctccggagcacagagctcaccagccccttccatcagcagggaagcctcatgcaggtcgcagggcccagcactaggacccgtgcctggaggcttctgctgctgccgcctccgtaaatcaccatcttacagtaggatcagcagaatgcattccataggaagcacagttgattagggcttaatggggagaggcgatctgaaatgagaagcactttgtaaataaaagctgattaagaagcaggcaggtttagagtcacctgcaccttgtagacacatccctgggagcctcaggcccccacacccttcatctgccccctgaggaaatggccctgtccctgctcagcactgggcaggtaggctctgaccttggaaactgggcccctagacaagttcatctgctgccactcctggccgctcagggctcggaggggtcccgaggatggacctcccacagcctcgtgtaagtaagaggcgggagtggtgacaccatttaccaggcatctggggcacactgctccaggctctgatgatgccccagactgcagaatctccccacccctgggctctgttcgaccgatggaccaccatccccagccagtcaatggctgtacatgatactgaggccagggactcaccctggggtctgtcccaggaaaggtagctgaagccacgaagccacagttgtggggctcacagatgtcatctgcaaacagacaggccgggctctcagctcagctgcagcagagcagccttagggcgtaaggagagcagggaagaggaggaggaggaggaggacggtgtctccaggttgctgtccaggccaaggaggccgagtgtgaacagactctgaggagcctgtcctggtagggaccagcctgggcgtggcacatttcaggaacagcaagaccggggccaggagtcaggaaggggaaggcaggggctgacctgggcggcctggaggccaggcccaaagccccaggtgcctgtgggggcaaggggactggcagggctcccaccctcccatctcaaaccctcatccagggaggagagcccaccccttccagcagccccgggaaagtcacttgctggggtcacctgccttccctggagcagtcacctggccaggtggaatgccggactctgattggccagctggacccttaggcccacccccgcgcctctgggattggctcccaggaggaaagtatgggtagggtagagggaccgcggatgctgggcccagccctgggttctctaggaccccactaggccacccaggaaggagcctgggcccacacctccctccctggcaggcccctcggtctgggtccaggagcccactttgctcacggtgccctcaccagagcagtccctgaccctcccctccctaccccaccctcagtctccctcgccacttggccccagctctccctagccaggcaatttggacaaattcttccactggcctgggcctcagtttcccttcctggaatataagggttgtgggacaccccgagttcgcctgccccccagccctagcccctgaacactcagagctcatcctaggccccccttggcccagcctccaggctgcaggagtcttgccctctccttctctgccctctggaagtcctgcccagcttttaggagctccacccccagctctgccccttctcaggtttcttccgacagcagggctgaaggtccccatgtctgtcaatgctccctagacagtaccacattcaccccacacctggcaggggggcttcctgatcatccccctttcacagatgagggactgagatcggggatgaaataaatcctgacttgagcagtggagagaaaagccatgctccacgcagctctgttaacctcggagcctgtgacgcccccaccctgctttccttccaggccccaaataatggtggtgtctgcctggtttctgaggcatccacactgtcctgtgccactgtctgtgcccccttcctggcccgtcctgcctggcaaagtcctattcacccttcagtgccctgaccgagatataatacccaccatgagtatttctgtccccaagtccccagtggactgattgtgtgcgacttggtgccagtttgaacctcctgcctgattctgactctgcaccaatcgtgggccctgtgggaagtggtgggatgggcccatcaagatggtgggccacaggtcagacagcttgggctccagtcctggccttccaagcttgagcggggcttcatcccttgagcttgatgtcctctgtgtgctgccctgaggactaaatgagactgtgtctgggaagtcacttgggcagggcccgggcccgtgcaggactcaggaaggtgtccctgaggtcatggctgcaccccgcccccacatgagcatgcaggagacaggctgagggccatttgctttgtcgtctcctggctcaagggtggcatcagtaactttgtgtggatgcagtggcttaagtctgtccactgagtttgctccatagaaagtgagtggctatcagggccctgctgcccccaccggggctgtggtacctccctaacgtgtgggactaggaaaagatgcacagcccccggggcagtagcaggtccggggtggcaccagagcaggtgttccctgccgtgtggagtgtggcctgccaggtgaggcgctgtagattgagcctggcatgaggatgaggcgcccaggcagagagaggggcaggagcagggccttgggcggtggaggtggaggtctggtccccagcacctggcgggtgagctaaaaccctataggctggaggccagagtgggcgctttgggccgctcctgcccactgtcctataggcagggctttgagggagctgagagtgcatcagggagcccagtggggctgaagcagggcagagtcaaaggcacagggaagaggagggagcacaggaggggaactgtggggtatgggacactgcagccctgggcagggccctggccacagggccagtttccaggcccagaaacactcatgggagataaaagtaggaccacagcccaggtctcatcctgtcaaggacggctccatgaaacatccctggggagccatcctgcaggctgcagcagctccgggaagctgccccctcatgcatcttcccaggtgtccgtgagtggatggaggcgacagtgggcggctgccttggagctcctgattctgcagatctgcaggcacgagcttggttggaccccaaagaccagctcagccaccaggaccctcctggacgctgctagttacaggacttctagcttgagctaaactgtcaggatgcggggagtgggtacggccaagatatcttgctgctgggctgttggttttgagaaagttgtgatgtgctctatacacacacacacagacacacaaacacacataagcaatgcgtacctgtgcatgtgtagaatgcataaacacacatgtattcatacatgtgcatttgtgcatgtgtgtacatgtagtcatacacccatacatctgtgcatatttgacgtgtgcattcatatatatctatatgtgcatgtgcgtacatgcatgcatacatgtgtgcatagcgcctgtatacacatgtgcgcatgtgtactatctagtttctggtaatggtgtagtagaggtcacccttaagtcattacccaatgctcagtcttcattcactccgaaatacagaagaaaaacaggcaccagggaaaatcagcaggtgtcatctgttagaaaatatttttaagtgtaactggaagcattattttcagtgagtataattatgcatcagtgtttatgtgatgtcttctgaatgggcccaagatgactgcgtgttcaaaagaacatgcttgttcgaccagggtgagtgctaattgtggttgacattttcttccagggaagcgggcgcatcttccaggcagaagcccgcacaggtctggcactgattttcaccagattttgttattacatttgtctcacagctttaaaatagtagcaaatatgtgcaatttatttaaacaacactagggaaattaacgccatacaagctcatactaagcaaatgaaaatgaaggatttttttaaaaaacggctgtatggaaaccctttaaaactcagagtctgagattcagagggccctggtgagctgctgctggttctgaagcaccaccaggcgggagagaccagccagtctctgcctccgtctcccgctgggagatgcgggggagctgcagatgcccagagggcccctgctagtggctgtgccagaggctcccctcgccctcatctgggagagatctgtccaggctgcctgccctcgtgcaggcacaaaaataatgctccaccacccttctccagaggtggatccccaattgcctgtgggctgggagacgccctgttctccaactgcagaacatatcaggcgtggttggcggccccaccccagagttgttaagtcttaggtgagacctaggaacctgcattcctaatgagctccacagggcactgagctgctggtcctgggaccagcctgggagctcagacctgtttctccccagtctgggatttatggaacacatcccgggtgggtgcaggaaacatcactgagacccccttttcccttggttccccatctgttccatgggaagatcgatttccgcccagtccaggaccttcctgaagtccagcaaaggggattcgacttcacaaacagagaccacagaagggagaggtggcactttcaggtgctctggccttggggtcacactcctggcgtccgaatcctgcctctgctgaacgggctgcatgggcttcatgagtgccttggcctcgcatggcaggaaagtgggaatgatggtgctccccgctgaactggtgagagggaggacttatggggagactacctggaacagcatttggcctggagcctggaacctgagtgcacgccacatctattaccattgttcctgtgggctatgttggcgttatttcaagccactttgagcagtgggattaatctggtctttctcatcaaagcttagagcatatcaacataaattgtcatatccccaaggtagagaccagctcccagggaggtgctatctgtctggggctaggtcttggaggacaggtgggatgtcttcagtggaagggccagatgcagagtcctgctgtcctgctcatcggacattcagtacctatgaggcacaggctactggtctgggcgaggaaagcatggagtccagttgtctgtgctgggttccggggagaatgtgcagctaggactgtcctggaagctctttaaaggcccctgaggagcctagaaaagcccccgccccttgtcatcatgaggggctgaagtcgagacccctgggtctccatgtttgcacctcacatggctcctttctaaggaaggctgggagcgccccatggaagcctcctgggttttattaattgaggcaaatggtggtgtggacccccactgcctggaggggcagcctgtggtcagatgcctcccggccagctttgtcctccctgccttgggctgccctggtgcaaggtccattctccaccacgtgaactctcatatcctactgcctctgcaattcagataaaatgagcatcaaccacgaagactggagaggcatgccatgccatgtgggcaccctgcactggccccgatgtggcagacgcatggacgccgcatatacgcgtgacgttctgttggcgctgtcagccgcaggagtcatgtgcactatcacgtttaggaaacacagaaagggttcaggcgcggtggctcacacctgtaatcccagcactttgggaggctgagacgggaggatcacaaggtcaggagatcgagaccatcctggctaacacggtaaaaccccgtctctactaaaaatacaaaaaattagccgggcgtggtggcgggcgcctgtagtcccagctactcagggggctgaggcaggagaatggcatgagcccgggaggcggtgcttgcagtgagccgagatcacaccactgcactccagcctgggcgacagagcgagactccgtctcaaaaaaaaaaaaaacacagaaaggtaaaaggaaggaagtaaaatatgataacagaactccctggtgaccagagaaaaccagtgtgtgcattttcatgtattttcttacatttcttttttctttttttctttttttttttttttttgagacagagtttcgctctttttccccaggctggagtgcaatggcacaatcttggctcactgcaacctccacctcccgggttcaagtgattctccggtgtcagcctcctaagtaactgggactacaggcatgtgccaccacacctgcctaattttagatttttagtagagatggggtttcaccatgttggccaggctggtctcgaactcctgacctcaggtgatccagctgtcttgacctcccaaagtgctgggattacaggcgtgagccaccacacccaggctctttttctatcctttaaaaaaatgcagttgaggctgggcatggtggctcatgcctgtaatcccagcactttggaaggccaacacgggcggattaccggaggtcgggagtttgagagcagcctggccaacatggcaaaaccccatctctattaaaaatacaaaaattagccagatgtggtggcggtctcctgtaatcccagctactcaggaggctgaggcaggagagtcacttaaacccaggaggcagaggttgcagtgagccaagatcgtatcactgctccagcctggatgacacagtgagactccatctcaaaaaaaaaaaaaaaaaggaaaaaatgcaggtgcagttgatgctgtatgtatgctttggtgctatttctccacttactaatattttatgggcatttcttcatgtcagtcttaaaagagtaacttttaatgattataatattccaagacatgaacacagtgtaatgcgtttagaattcactgtcagacattcagatttgtgctctggtatttttacttgtttaaaaaacatccaaagtaaacatctgtctataaggactttggtccacctagagtttcctggggacagatttccagctgtggagttactggatcaaaagggaccgtcctttttgaggctcttgatagtcactggcaactgggaggcagagggctgtgctgagtgaccgcggggacccagcagcaggagctgcatcagtgtcagtcctgacagcctgggccctatgctaagcatgggctgggcattttctcattgtcatctgatgtcattcccatagcagtccctaaactcagggccattgctactatctcccttctgtcagagaagaacccaggattgtgagagatgaaggcactttgccccacgtcacatgagcttttgtacatacacacaggtggggtccaaggccaaatcccacaccctcagccgtcagcctccgcccactgactcccatcagcctccacccactgactcactgcgcacccccagtgttgcagatttatttcgctcagccttgtcaatctgacaggtaaaaaggatatattacttagatatgcattatttgattactgggagatgtggatatttttcataagtttattgatcatttatatttgttttgctgtgaattatctattcatgtccttttcttgtttggaaacaacattccatttgatttttttatttctaagagtgctttatatggtgactattaaccttgtgtcaaattgttgtaaatcatattttccaaatgtgtcaattgccttttgggtctgttttcataaacaggagttttgtgggaaaacgtattagtcttttcttttgtgatctcttgcattgtttggggtgagcttaaaaagccctgtctacactattggtgacattgtccactatattttcttctttgtttatggtttctttttcccgcatttaattttgtaatcggtctcatcatattgatgggggtctcacttgatttttttttttccctaatagttcctttcccagcgttatcccgcccttcccgcttagctccttgtcccagcgttacccgccttccctctcagtctcgggcagtacagatcatcttagcagatgccattttcctctgtgcaaaacctaactggacttctctgcctcttctctcccctttccaaataaagccgcagaaaggaaagaaggtcgtggctctggacccctctccgcctccgaaggacaccctgctgccgtggccccagcaccagaacgccaacgggctgaggcggcgcaaacgggactgggtcatcccgcccatcaacgtgcccgagaactcgcgcgggcccttcccgcagcagctcgtgagggtgagtgcagacccctcccgcgggcacgggggtctcggcgttagcagtaggctcttctcccgacatcccaaagccaggggcgggttccgcgtttggtgtctgagaaggtcgcgatttcaccctttctgtaatgagataagccttacacagcgcgatgaaaaattcaggcggggaagctgcgtcctccgcggtggatgggcctttgtgagttaggggtgatttctctcttggttactttcaagtggctgctgtgtgtgtggaagcagtgggcaggggcgtgggtcgtggcctttgacctctgacccctttctttggtctgatcacatttctttccatggatgactaagatcccggatgatggggtggtgccatgacgatccctgcgccgaggccagcgtgcgccgtgccgcggtctgtctgcaagttcttggtccccgagctcccaaggccacccgagattgcttttaccgcagaaataatttattttacaaatttgtgtttctattatcaaggccatcaacgagcaatttcttcttccctttgaagaaaattgcagcccaatctgagcaacaatttgataaaaggatggcgagaattccattaaataattcccaaccgttgtggaaaagcctcaccccaccctttggaaatgagggtccccagagtgtgcttaaggggtcattctcattctttgtgctgtttagtgtgttttgtttctcattcctttcaatgcagaaggctgggctgtgcgtttggaatgcagagatgggaggaagagagcagccaccaggcagggtccccccaattttttgtatccctaacctcggccaccaggggaccccaccagggagcagccaaaatgaccggttatttatagcagaaactctggcatgagtgaatgcagtgtgcctccacaccccagccaaggtgacttggttgcaaatgtatcacctgccttctctgcacagagccggccctcccacctcagcacccagcctctgctgcattcttccctgtcaggggctcagctttccttggccacccatgccccttgagggccaggcaggtttggagattttcctgtgaaatgcagttcagggcttgaaggaagccaccaggggttggaaccccatcctgggcgagcttcccaggcccacatctcctgggcccactgggcaacctcccgcccaccacggatgctagagacgatgccaatggcagtgccgtggcccccatgctgcgcccacctcaccatccttggggccgggatttcttgcatccggccattgcttgtgttgtcattgacttaaaattcgtctcaaagtgattcattttttttccaacttttattgtaagttcaggggtacatgtataggatgtgcaggtttgttacctaggtaaacgtgtgccatggtggtttgctgcccctgtcaacccatcacctaggtattaagcccagcatccattagctattcttcctgatgctctccttctgccccacccctcccacaggccccagtgtgggttgttcccctccctgtgtccatgtgttctcatcattcagctcccacttataagtgagaacatgtggtgtttggttttctgttcccactttagtttgctaaggatgatggcttccacctccatccatgtccctgcaaaggacatgatctcgttcctttttatggctgcatagtattccatggtgtatttgtaccacatttgctttatccagtctgtcattgatgggcatttgggttgattccatgtctttgctgttgtgaatagcgctgcaatgaccatacacgtgcatgtgtctttataagagaatgacttctgttcctttgggtgtacacttagcaatgggattatggatcaaatgggagttctgcctctaggactttgaggaattgccacactgtttatccccaaaggagattgtataccaaaccacagtttgatcactgggatagtttgtcaggctaaaagctgactgtagagaaaagcataaggtgagagaacaaaggctgcccctgatttgttacccaggccagtggggcaggggctgaagggtgtgctggaggcatgaggaccaaccagagattcctctttgaaggtcatcaggactgaaggtcaccgagacagggagcgggcttccatcatgctcttccaccttatttaatgccttgtgcttctgccacccccacattgcccctggtagacagtcatcgatcttactctggggtcagcaaaccttttctgtgaagggccaggtggtaaatattctaggcattgtgaccatacagcttctgtcgctgtggtgtgaaagcagtctcaggcaatgtgtcaactaacaggttggccgtgttccactaaaactttatttacaaaaacagggagtgggctgggttagcccatgggccatgatttgacaactgccaatcagacacttttccgaaactcaagaaagggctgcccaagccaccctcacaggcacagggtaggcacattatttgtggagtgagtgagcagtgaatttgagggccctcatctgcttgcacaccacagagtgggtaccagcggcatctgactgttatctctgttatcttagcacaactgggatattctgctgtcctggctcttggagtttctcagcctgatgatctaggactgaaaggtgggaatttcttcctcagctctgctccacagataggcttgtaaaagggaacatgaaagagcgaggtcacatgggcacagcccctgtcccaggagggtccccaagctgtgtgtggccccacacaccatctcctgatggacagtggagagaaagacctcctgcagcatcagtggctgaggaagtgtgggctgggacaggccccatgaaaggaccaaatcctcccagaccagcagagggctcgggtaaggatgggcccagttgtcctgttgatgagaacgtttctccggaagacatcatcatgagagcccaccttacgccacatctgaatgccctgatggggaacatggctttccaatttgcagcagggaaatatgccccttctgattaacacgagcttggaaagtgtggctgagagagcagccggcaccgggagctctccaggccctgcaggtgcagcctcctgaggactgtctgctgctgacctttctaaactagaaatgtgcagggaggaattgtgaatttggctttgggtgtcagaatgagaaaagctgcaaattccgtgctcccaggaaaccacccccagcatctccgacccaggaagtggcagcttctcctgttctggggtctgtggctttgctatggtttggaaccactttgtcatctgctcctcatatcccctgactcgtccagcagcccctgcaggcagggtcacctccatgcccagaacgtcactgcagaacaggccgtgagcggaaggaggcagtgaggtgggtgcgtgttagggctgacgagctgcactgcagcatttcagaaactgaacccaacctaagtcgatttcttgctcactgtgaaggttggtgggcagggcgagggtggcctgtgctccagccattcagccacccaggatgagcgtctcgggactggcgaggcttacaagtggcatacgtcaatcgtgcctacatgccactggccaaagcccagtcacatgaccacgtctaattgtaagggacatggggaacgagtccaactccgtgtcatgaaggagggggaaatatggttggtgaacagctggtctctgtcgaagcaggtttctaaagatgagatcagcctgtgtcctttcctccctgatgaacccactgtcccaaggagtccctagtcactggagccctgggtgagcagttcagatgtaattcgccaaccagatcattctttaccctctgccctgcttcagttcgccatagtgcttggtgtgaactggctgtattttctgtctttattcacctacttacttcttctctaagaggaggcttcctgaagacaaggatcttggctgtacccctagtgttgtaaacagcccttggcatgcagtgggcactctatttgttgagggaatgaatgagtgagtgagtgagtgatagacgtgatctcagtggtgactgttgtgctgggcacccatcagctaaccctgcaaaatggcccagcagttggaatttggcagaaacgttagcactgcctgtcctggctctcagagtccctgcaagtatcgctgtggctcacacaggggcatccccttcagcttccatccaaaggaaggcggagtgggcatccaaaccgagcttaatgccaggaaagatggacctttagtgaacggaaaatggaatttccattgtggcttctgtagatttgccttttccaaatggactccaagtcattatgtaagaactcagtgcatgtgcacacacatccacatgcgcacacacgtgcatacaaaaacacacgtctacacacgcacacacgtgcatacaaagacacacacccatacgcgcacacacgtgcatacaaaaacacacacccacatgcgtgcacacgtgcatacaaaaacacacacccacatgcgcacacacgtgcatacaaaaacacacatccacatgcgcacacacgtgcatacaaaaacacacatccacatgcgcacgcacttgcatacaaaaacacatccacatgcgcacgcacgtgcatactatacacacatgcacacacgtgcatgcaatacacacatccacatgtgcatacacgtgcatactatacacacatgcacacacgtgcatactatacacacatccacatgcacacacacgtgcacactatacacacatgcacacatgtgcacataccactctgcttcacacacacactcctacacgttcatgtttgccacctccctccctccaccctcccctctatcttccattgaattcttatctagcacaggcagtggtttgtggggtgctttcctgtccccatttccatctataggaagctgatgagcttcctggcagtgttgtaggggagacggctcctggaagaagccccaatcacagagacggtggtgaatgcagcctgatgcggggcggcaagctgagcacagagcgctttgaggttcagctgggatcagctgcagttctgcgctcattaaggcatttcattctgataaaatatgttaaacgaaaaaacgagcgggagaggaggaggcagaatactcttccccaaaaaaagtctgttaattacaggctttttccttggaaggaatatcacgtctcttcctaagcactaacggcaccacgcagagggaaataggtaacctacttgtagagaggaaagccctgaaaagcaaaggggtggctctaattggcggggctgtggagccaggggtatctgtggcaaagcagggagccacgcctggtggttctgccactggaatcagaccgcagtctaaagtgagtggtgagtgaggaggtgtacccacaccgcggagggaacactcagaaccccaggctgtcccttcttctcaagcagaggagggaggaagccgctcacagttaccgaactgattttccaggaacttggatagggacttttctttatgtccccaggggaactggggaaaatggcaggagggagcagcatttaaaaggttagcaggacgccctccctggtccagaattctggctctggactggacagtttgggcagttgctatggtgccaagcaccatgcgggcactggggcttcaggggagagaggatatagagctctcctgtggccttcaggaaccaccaagcaatccacattctgcctgaagttcacaacctggtccctcggcccttgtagggctggtacctacacaggcacattcttaaagggttttaaaacgccacttgcttggctagcatacacgttaggtttgactcctggcgagattcagaatgaggataaaatgaaacttttaagaagagcatctattgcttggctgagtctaataccaatgcacaatatgttcccttgagaggctgtccagggcaactgcaggaatcagcgaatcagctgaaggtgatgagggggaacgtggtgctcctgggtgcgaatcctttcattttggcagttgatattttagaagacaagaagtcatgcaaaccctcgggcccccctgccagaggacaagctaggaaaagagctctgaagacaaggctctggagggaggtcgctccacagtcgcggagcctgcgaggtgcttaggtcgctcggaggagacacacaggagccatttccagagaagcacaatcacaggtgcgcagccacagatggctcacaaaggatggctcaagtcagccccctacaccgaacaactcaaatgagcttaagcggattgaagtgcaacgtttccttcacgtcttctggataaattcggttcccatttgtgcacatacaccccattgcttcacatccagccacaaatacttacaccgttctatgtgaacagagatgggctgggtctttgggagcatggaggtgaaagggcacatggctgccctgcacgggctctggactgcttcagcaaatgagtgatgccccgagctgggtctgcatcccgagatgcacggccaaggtgccggagacccctctctggcccgtggcaggggccccataaaagttgattggatgtgtgagcacgtgtggcggggccagctgaattttagccccacgttatctttacagaatgtttgctgggtaacttagcagtataattagcacggagtccacctaagcacccactttccaatactctaaagcatccatgtgtgtacaaatgactcacgtggcagtcattcgttgtctcatggaagcagggtggcctttccaaagcacggatgtggctgtgtggttcccactgtccttgggagatggcctgaatgctcaccttgccccacaggtttcatgagctcatgccaccccttggcacagcaagctccagttgtgctggtggctcgtagcttccagactggctcgtagcttccagactggctcgtagccttggtcacctgcagtcctgtgcacaagctcccccctcagcctggagggttttcccggtgcacccaacactcccctcagcccggctactccctacctgctctgagaactccctacttctcaggacccatcagaggccttcccaaggggccagggcacccactttgcctgctactgtggcagagtttttgacactgtttcgtcggtaattattgtctgcaccccccactaaacctaaagctccttgaggagcacacatgtcgttaaacactcattaagtgagaatgacggacacggccctagtgcctacctctgctagtcagcccttcatggtcattaggaagattgttacgttagggatacagtacctggcaataataaattggaaggtcttttagtaatggtggtgtggtttatttcattctaacactcctatcaataataactataaattctaggggaaaatgtttaagctctttgaagttacttgggagaaatggatagtagacagaatctgttggggactccacgctcgaagggagaaaatggcactgggtgagacgtgtgtgcaggtggcttccctctgagggcaccatcccaggccttgcctcaaagggtgagtggatctcaggcaggaagccacagacgtgctggtcacaggagctgtaagatggagtttagaattgacaaagcagctggaatgtgaggggataaattctagaaaatacatagccacagatagggactccccagtacgcatgtaagctctgcccagatccttggctgccccggaaatgtgcatgcacagagaggcaccgaaggacccagtgaaagcaacagtcagcagacggaaagaactaagcagagattccaggggaaacacattgagatatgcctccagccaagtgaactccctgctgtaatgaaaaataaacaccctcagggaaagataacagaaccagggtctctacaaggttgcattcacagtgatcagtatacacacaaaaattattagacatgtcaaaaagagagaaaatgtgatccacaatcaagaaaaaaactgcccagagaaaggaacccaggaaccctgagatcacccagacattggaactagcagcaaggcctttaacataatgctttatagtatgttcaagggtcagaatagatggatagatggatagatggggaatcacagcagaaaaaaaaatttgatactctaaaaatataaccaaatagaaatgataaaactgaaaagtacagtatctctaacggaaaactcactggatgggttcacaagtggattgctgaggcaggagaaagggtcagcgcatttgaagatggatcaatacaattatccagcctgaagaaggaggagaagtgaagcacacagagcttcagtggggcggtggccagtggcctaacatctgtgtgatggcaataacagaaggagaggagagatgatcagaaaaaaatcctcaaagaaataatgattgagactttcccacatgtggtagtgaaacaaacttacagattcaagaaacccagtgaaccctaggtaggagaaatacaaagaacgccgttcaccgatcatagtcaaactgctgaaatgcaaaaataaagaaaacatctctaaagtagaggaaaaggtgcaatatgtccggggcagcagtcagaatggggtcttctcctcagaatccctgcaggcacacgccaacagaacaacttctttaaactactgaaaagaagctaccaaccaagagttttatatccagaaaaaatatccttcaaaaatgaaggtgaagccgggcatggtggttcacacctgtaatcccagcactttgggaggccaatgcaggcagatcacctgaggtcaggagttcaagaccagcctgcccaacatggtgaaaccccatctctactaaaaatacaaaaaaatcagctgggtgtggtggcacatgcctataatcccagctactcaggaggctgaggtgggacaatcgctcgaacctgggagacagaggttgcagtgagccgagatcacgccactgcactgcagcctgggtgacagagtgatactctgcctcaaaaaataaaaataaaaatgaaggtgaaataaagacattcctgataaacaaactgagggaattcatcaccattagatccagagggagtgataaaggatgttcctcaggccagaaacaaatgacaccagttggaaatccacacctccaggaagggatggagagctcaggaagagatacatttatgggctaatataaaagattatcatttttcttttaatttcttttaaaaagctgactatttaaagcaaaagtacagcattgtattagggagtttataatgtatgttgatgtaataaatatgacaacagtaggagaaaaactaagtaagacaacagttggacaaaggacagacggggtaaatggagcaaggctgttttgaggttctgacgttgctggttaagtggtccaatattaactctaggtaaactgtgatgcttatgaagttgagatgagtattttcattagttaagttaatcaaaatgaatttctttaaggctgggtgcagtggctcatgcctgtcatcccagcactttgggaggccgaggtggacgtaccacttgaggccaggagttcaagaccagcctgaccaacatggtgaaaccccatctctactaaaaatacaaaaaattagccggccgtggtggcacatgcctataatcccagctactcaggaggctgaggcatgagaatcacttgaaccccggaggtagaggttgcagtgagccaagatcatgccactgtactccagtctgggtaacagagtgagaccttgtttcaaaaaaaaagaatttctttatatatgcgtcaatgaaaactgttagtcaccagattgtcccgtttattagcacaaataagtgagttttggatgtgcccatctatgaaaacaaatacaaggcgtcaatgattctgaaggcttcttccaaattcattacccaacattctatctgaacacactaatatacatttctagggtcgatggtttaaactgtaaattctccaaaggcacattctatatgatttttgcccacaacctttccttaatatgtacatgttttctagataaaaacattaaatacagctaaagtgacatcaaggtctccctcccttcctttcctccaatacgtgagagaaatgtaatcccagttccttgggacagttctcgaggccctcagatgtcctgtgcccccgaaagaaatgtaatcccagttccttgggatagttctcaaggccctccgatatcctgtgcccctgggagaaatgtaagcccagttcctcaggacagttctcgaggccctcagatgtcctgtgctcccaggagaatataagcctagttcctcgggacagttctcgaggccctcaggtgtcttgtgcccccaagagaaatgtaatcccagttccttgggacagttctccgggccctcagatgtcctgtgcccccgggagaaatgtaagcctagttcctcgggacagttctcgaggccctcaggtgtcttgtgcccccaagagaaatgtaatcccagttcctcgggacagttctcaaggccctcagatgtcctgtgcccccaagagaaatgtaatcccagttccttgggacagttctcaaggccctccgatatcctgtgcccccaggagaatgtaagcccagttcctcgggacagttctcgaggccctcaggtgtcttgtgcccccaggagaatgtaagcccagttccttgggacagttctcgaggccctcaggtgtcttgtgcccccaagagaaatgtaatcccagttcctcgggacagttctcaaggccctcagatgtcctgtgcccccaagagaaatgtaatcccagttccttgggacagttctcaaggccctccgatatcctgtgcccccaggagaatgtaagcccagttcctcgggacagttctcgaggccctcaggtgtcttgtgcccccaggagaatgtaagcccagttccttgggacagttctcgaggccctcaggtgtcttgtgcccccaagagaaatgtaatcccagttcctcgggacagttctcaaggccctccgatatcctgtgcccccaggagaatgtaatcccagttcctcgggacagttctcgaggccctcagatgtcctgtgcccccaagagaaatgtaatcccagttcctcgggacagttctcaaggccctccgatatcctgtgcccccaggagaatgtaagcccagttcctcgggacagttctcgaggccctcaggtgtcttgtgcccccaagagaaatgtaatcccagttcctcgggacagttctccaggccctccgatatcctgtgcccccaggagaatgtaagcccagttcctcgggacagttctcgaggccctcagatgtcctgtgcccccaagagaaatgtaatcccagttcctcgggacagttctcaaggccctccgatatcctgtgcccccaggagaatgtaagcccagttcctcggaacagttctccaggccctcagatgtcctgtgcccccggggcctcatcagacattaagcatgcagtccctttgcagctctggatggcgcgagtttcccacgtcccatccccttcctggctatgggcaagtgcaggctggatcctggcctcctccttcctggcctccagctcactgccctacccctggagcagaggggccttctacacctgagccacgctggccactccccaagctcactcgaggtcgaagctgtggccgacgcttgggcactgggggcttcctcctgctccccaaaggcggggtcaggacactcctccctggctctgcccagcatgtggctctagggctcaccacctcagttcatcaggtctctcctccgatggcttctctgccacgataggacccccaccctattcacacgcagccctggcccactccctggccatgcttcaccatctcctcacaccacgtggcatttcctcatggggagggtcacacctgtggcagctcagttttgcctaccatccgcttcctcctgctgggctgtgggctccctgagggtggggcggctctgatcttgcccctgtctgtgtcccagccactaagaatgcaggctggcccagagaatccctcagtgaatcgctgctggaggagtggatggtgacctgctagaggcaggagctggatttggcctgtgggctgtggtttgtgacccctggactaaccctgtcaggtaggatcgtctggtggacactgcacaccccaccaggtgcacagagccctcacccagctggatagggccctcacccaggtgcgcagagccctcacccaggtggacagggcccccacccaggtttgcagagcccccacccaggtgtgtagagcccccacccaggtgtgcagggctcctacccaggtgtgtagagaccttgcccaggtggacagggccctctaaagttcaggacacctccctttcaaggagccacctggagagagatttggggccagcttagccacttagccactttcttagagggcagaggcccctgatgctccagctctagctgtgctagtgaatttttaagccttcagagccagggagcgtgcgagcgagtggagaatgaggtaggtttctttcctccaaaggaaccttcagactgaaagtctctgggaagaaaccagtggccggaggtatcccaggagccagcttgagtctgggttttctcccctgtaagtggactgtggaaatctcccctctggttcaccagacacagaatccacgtccaggatgggaggaactgctctaagaacacgtgaacgagaggctttgggggtcttcggctcagccctccggggaaacaaggacccttgagaaagttggaccccccgttcaaacagcgtctccttccgcagcaaaacagcgtggcacttccattggcccatcacctacacttcagggcccacctccttcctggccccaggcaggaggggcggctacacatgtgcaccacccccatgaccgtcttgagtgtggttctgaagacgcaatcccaagatgaacacgatcgccctgctgcagtctgcgagtcgcccggcagccagacacagcgctgagacccacggggattcacattgtccccgctgaagccagagggatgtgaagaaagcaatcattttggactctactgccctgggttgtgtggtttaattgctcgtgtgaaaggaacaggcaggccctttgtgtttaccgccctctcatccaagcagaaaatgttccctttcttgaaatgctttaatggctatatttacgcagctgaaagttccttaagaaatgaaagtaaaatcaaattgctgcaaatgctcagataatttattggagaatattcaattcgaatatattaatattttagattttcatcattaattgaatattcagggatttaattttgtcactgaattgctggagcaccctctgtgaacaggtgtttaggatgagagctcaggcaccttccacaaatggactcttagagtttggcaatggccagggagccttgtgtctgccaggccagctccaggactgctgaccagacattgtctaggtgctaatgcgtgggctcccagggccactgtagagtgcagctgttctgaggacaagtttaagggtgaaggagagtatgtatgttggggcaagctggcaacagcccttgcttggaaagagatgtccttcattcttcagttgtggccttcatacttgagaaggtgaaactgtctgtgcatgaaatgatgatgacagcaggctgtggtggccattatccatccatccatcatccatccatccatccatccatccgtctgtccgtccatccatccatccatctatccctccatccatccattcatgcattcactaagcctttccatgtcaagcaccctgtatctgttggttctcacgctgctaataaagacatacccaagactgggtaatttataaaggaaagaggtttaattgactcacagttcagcaggtctggggaggcctcaggaaacttataatcatggtggaaggggaagcaaatatgcccttcttcacatgatggcagaaaggagaagtgcagatcgaagcagaggaaagccccttataaaaccatcagctctcatgagaattcactatcacgagcgcaacatggaggtaactgcgcccatgattcaattatcttccaccaggtccctcccacaacacagagggattatgggaactacaattcaagatgatatttgggtggggccacagcgaaaccatatcaacccccaggtgtgctgttgtgggtacagaggctacaacagggaacagatggaacagtccagccctcatggagtttatgatcaaagacagggataagtaactcttagttacagtctgggaaccagagaatgtgggatgccattgaagtttgatttcagataaggtggccaagaaagtcacttctgagaggactgaatgcagtggcagagagaatcatggggatatcgaggggatgagtgctccaggcagagggaacagtaagtgcaaatgctcagagtcttagaggaagagccaggatgtcagaggggctgaatagaaatggccagggagagggtgagagagaagaactgagagagtgtcaaggccaggtcactcaggggcgtgtggccatgggagggacttggtggttgattctgaaacccaaagagtgatgtggtgtggcataaattgatttaccaagacccctctgactgccgtgagggaccaggcagagcaggagtaaaggcagtagcaggaggcagcttctcaaccctcccactgagctaccagaaggccaggggtgttgttttaatgtcccgcccagtaaaacagctggaaaccccaatcttatcacagactggacatctgtgacccttgaggaatgagaggctctctttgattctactcatgagcatggggtcgcggagcttctgcttcactttgtgtgtgtatgtgaggagctggagtgtggcagccagaaaaagaaacagccctgaggggctgggggagggctgggggtgcagacagggtggggataaggcacagcgtaggttctggttaaaggatttctcctggcttggaagggaagtgatggcagaggagccctggggaaacggaaactcatcttccaggatcctggctcccagctcccttccggcacccagaggtggggtcaggaggcccccaagtgctgacagcaggtgttccctggagctgacagaggagacagcctgtgtgccatcagccctcctgggctcccagcccggcagtgttttcctgctgacagcagtcctgcaggaggcctgaccatgtttccgatatttgatgtttcctgttaatttctaacagcagacttttctaatattctgaagactcctttctcagaatattagagacctaaggagggaaagccacctccccaaagctctctgctcaaagacctgacttcagctcagagaaacaagggcatgggagacgaggcccaaaagcaaagccaatgagaagtagatgcgtgggaggggaattgcatcttggaaatcaacctgtccattagctatagaagacagcagaaaatgctgcttcagtttccacttccctagtggtgctgaaacagtcaggcttctgtcttcaaaatgactctctaaaaccatgccccagaaagagactttgtccccggggccctagcatcaagctggcctgggttgtgtggggctttgttttgctcgggcagaaagtctcgtctgacacaggtgtgggttggtcaggcaccagggctcagggacctccctggtaccaacccggggaaaagtcctcgaagctctcttgatggcactggctttctccgtagaggcccgagatggcctacggatgcatctgcacctgagctgtgtggggccctgtcagagtggttttcgatggagttatgtttgatttcggcttttgggcttctgagttgtaatgcctattgaagttgagaagctgatttcattttcccaaaatgtaggcttattaaaacaagaaaagccatggagccttggtgtctgtttcttaaaagcaaagttaagcaatcagccaaggtgcatgtcagaaaaggggaggggggcggtgcctgggctggcacccacgggataggaggggccagcagtcacaccctgcctgcctgaagcggcctctccctggaggacaaaaccagtggatcttatctgatctagtggtttcaggaattttctacacacataaggcacatcagggaggagaggaaattgttgatgtgctccgtgttttcagcagaaaatcgttcctcatgtcgctgcgtgcatgagcctgccttgcccggggcatgccagcgcctcagcccagcaaaccgacatgcaggcccagagttaggcaggggctgcaagcacagcgtttcccactcaccattgcccctgggaggtagaactggtggagaagggaaaggaagtatggttgtcctatgcgatcaattggggacagcccaggcctgaagactttgtctctataaataagtagctaggtgaagacttaggttttctatgaaaaataatggaatctgaagctaatccatgttgcaaattcaaggtgtagatttgggcagggttgacataatttattgtgttcagtctgaaattggtcaataaagtatgacggggtgaacagtatatccacagtctattacattaggttagtgtccatccacccttccaaccatacacccatccatctgttcatccatgtatccacacttctacctacccatccattcatccatccatcctctgtccacccatccacacacccacccatctacccatccgtcatccattcatccatccatccactcaaccatccacccatccatccacccacctaccatccatccattcatctctccattcatccattcatctctctatccattcattcatgcatccacacatccatccacccactatccatccattcatcctttcatctctccattcatccatttgtctcttcatccatccattcatctctccactcatcattcgtctctctacccatcccctcatctacccatctatccattcatctctccatccatccattcatccatccacccatccatccacccacccaccatccttccattcatctctccatccatccattcatctttctacctatccattcatccatccttccatccatctacctacccaccatccatctatttatctgtctaaccattcattcatccatccacccaccatccacccattcatttctccattcatctctccatccattcacccatccattcacccacccaccatccatccattcatctctccatccatccatttgtctctccatccattcatctctccactcatcctttcatctctccatccatttatctatccatctatccattcatctctctctccatccattcattcatccacccatccatccatccacccacccacccaccatccatccattcatctctctatccattcatccatccgtatatccatccttccacccacctaccatccatccattgatttctacacccattcgttcatctctccattcatccattcatccatccacccatccatcctcagtgctctcaccctcagactatctcattgctcctgacagcagcaggcccctaagccagaactctggcataaccacagcacccagctccagctactgtttcaaaacgcttaaggcctttcaagtaaacgaaaaaccgaacaggcaaaaaaattgcgtcatgagttgctgtccttaaaactgtttcaacatttgaaaactccctgtcgaggataaaggtaataagtttttgacagtggtggacaattcttccaggtgtttggggaaagccattccatttggcttacctatgaacactacataaactttctgacttgatgctgaagcctagccctgaggaagattttaggaccagagcagtctccttgattgttttcctaaatcatcagcaacaaaaatgtggacttagagaaagaagtgtgttcacccagatttctccttagaggaaatgttaggtttttctaggaaagtccatcttaggccggatgaaaacagtgattcacccggtcatggatgagacgtgtattgcgatcagctctgtggctggtgttgaggtccgcagtgggccactcagtcacggttcctgtcctgaagcactatacattgctggtggagacaggcggtaaaggcaagaacagatgggaggagaagaaactgttagaacacggaaggaaccacagggagagtggagcacagggatgggatgggcagtgaggggcaggctgggatggggagcaaggctgtagatgggacgtgccagccaaggcctctccgaggagccagatgctgaactgggcctgcatggcaaggagccggctgtgcacaggtcaggcagagacccgcaagtgcaaaggccctggggtaggaatgagctgggcacacccaaggaatggaaaggtctgtgcggtgaaaatatgagtgagggaaagggagggaggggcctgggggagggcaggagcaggtcccagggcccccagccagtaggaggttgggtgtagctccaatgcaggaaaaagcctgcaaggagccatctgattgtccgtctatcatcccctggatgcctttggctgcctggtggggctggaaggttaaggcgagagctgccccagagccccagggaggagagagttgccctgaggagagatgtgggggcctgggctaggacagtagaggcgtgaaggtgaggaggggaaagcgggggcccagatggcctgcagggaaggacccagaggacttagggagaggcaggtggaggaaagggagccatcgaggctggctcctgggttttcagcccaccctgctgttgaggtgacagcacccagcatccccactgctcaggaggtgcccacgtgtggggtgccatggggatactgtgcacatctgtcccccctcctgcacatctgtctcttcccactccctcctcacctcttgttattaaagaggcttcctgccccagcccaagggcctcttccaagatgcagctgctgggtgcgcgggagttaagtctgctgggctgattcccgggctctgtgttcagctctccaggatgctgcaggaaagcaggaaatcaaataaggccattgacacctcacccacaatctttattctattgtctcttagtccaccccaaaaaatgtaaatcaaaataaatcagaatatctttagatgatgctgtgtgtgtgtgtgtgtgtatttttttttgagatggggtcttgctctgatggcccgggctggagtgttgtggcatgatctcagctcactgcaacctccacctcccaggttcaagtgattctcctgcctcaaccttccgagtagctgggattacaggtgtgcatcaccacacccggctaatttttttatttttggtagagacgaggtttcaccatattggtcaggctaatcttgaactcccgaccttgtgatccacccgcctcggcctcccaaagtgctgggattataggcatgagccaccgtgcctggcctatgtgttttttttgtttttgtttttgtttttgagacagagtttcactctgttgcccaggctggagtgcagtagtgcagtcttggcttactgcaacctctgcctcctgggttccagtgattctcctgcctcagcctccagagtaactgggattacaagcgcctgccactacgcccaactaattttttgtattttttagtagagaccggttatcaccatgttggccaggctggtcctgaactcctggcctcaagtgatctggccaccttggcctcccaaagtgctgggattacaagcgtgagccactgtgcctggcccagatggtgcagtcttaatgggagcaatgtcactcccaagcagagcaaacattagttcttggcgacaaaaaaaacaacttagatattataatggatggtggccctccaaaggcacataaacagatttcatggctggaagaggcaactgggaaagaaaaattttaaaaaggctctgggggctagggggataataagagacattgagaaacatcgctctgggacccataaagcggcccccgaggtcagggtgctccctggacagtcattttcaggatcccagcaagaatgaggctgaggccgggcgcagtggctcacgcctgtaatcccagcactttgggaggccgaggcaggtggatcacgaggtcaggagttcaagaccagcctggccaagatggtgaaaccccatctctactaaaaatacaaaaattagctgggcatggtggcagacacctgtaatcccagctacttgggaggctgaggcagagaattgcttgaacccgggaggtggaggttgcagtgagccgagatcacgccactgcactccagcttgggcgacagagtgagactgcatttaaaaaaaaaaaaaaaaagaggccaggtacggtggctcactcctgtaatcccagcactttgggaggccaaggcgggtagatcacgaagtcaggagatagagagcatcctgactaacacggtgaaacctcgtctctactaaaaatacaaaaaaaaaaattagctgggcgtggtggcgggcacctgtagtcccagctactcgggaggctgaggcaggagaatggcgtgaacctgggagatggagcttgcagtgagccaagatggcgccactgcactccagcttgggcaacagagtgagactctatctcaaaaaaaaaaaaaaagaatgagcctgaaataagtgaatacctctcaccctggcagctcaggaggtgtttaagcctgggcccctgggagaactctgatgtgagtacttctttgagaggtggaggagacacagggtggggcagggaagtgaaccaatgaaggggaggcaggccagtaaatgatgtgttatcaagacacccgcctgggggcagctggacattccactaagccagccctgggaacccgtcgttcccccacttccgccactgtgttgaggtcctggggtgctcatacaccaagtcccttggtccttggttggaggctgttcccaaggacattaattcctcagcattttcagcctgtcaagtgggtagcaaaggtggctcagtgggaagagaaaggccactggcaaagagtcacaggtgctggttggaagttggcaaatgtgccctgaaatgataacatcaggcagacatgggtgggcacccacagcttctgctacaatagcacatccttggactggacacaggctccatgactctcccccaaaccacctatggctggtcccatgcacctaggaccaaaaagaagctctaacccaggccagcaggactgcaaagtgcatgatcacacagtcccgcaagtgggtcctgcctgcctgctctcagacctgccacagggctcattgctccaggcactgtgggcattttaggatgttcttaaatgtaactatgcgccttataggaagaacgtcaaactggcctaattcctgagccactcctgaagtggttccctctgtcctaatgtttgtcagagttttcttggtttcttaaatatcagtagaacagagtgttcctccactgggatgatggtgataaaggtgggagtggtggtgatgatgtttatgatgaggatgatgatggttataatggtgagggtgatgatgttgatggtaatgatggtgatgatggtggtgataatggtgatgatggaaatgatggtagtggtaaggatgatggggttggtgatcataataattaagaggaggacaagggctagtatttatcattgctaccagctaccatgtgagtttcatacagatcatctctaaaatcctaagtttagtcctcataaaagccatcaccttcccagcaatcactttgtactgaccctttcttcaccatagtatcctgagccccatcagccagttgctctcctgtgtaccagggacagaatggaatgattactgtgaatgagatgcagcctctgcctttaaggagcccccaggaaggtgagaggaatgacaggtgagcaggaagtcacatcatggtggcgtaaatgagacactcagggtgacaatgggagccccccaggacgacacatacgttgtgcttggggagactgaggcaggcttcacaggggaagagaggcgtgagcagaaaacagaacaaaaaggcatcatccccttaaagcaggagggcatcaaggcagagagaagggcagggaggccagtaggccactgggatgtgcagcttgctttgcctgtctggaacataccagaggcggggccaggagtgtggactcaggaaggagggaggctgggccccaggaccataagagccactgggctggagtttcattcacacagccaccctggaaggctgcctgggacagaagcaatgttgcatgagtgaatgaatgaatgagtgaatgaatgaatgaatgagtggatggaggatgaagattctcagagctgtgctaagaagggcgggctttgtcctgagagtacgagaacctttgctgagctttcaggcactgagtgacatggtcagatctgtgcttaccttaatccatgcttcccctcccactccccacacagcaagctggaccctggtggaaggcaagggcagggctggcccctccccctccctcaagcccagaccaccatccagggaggctcccggaccgctgcctcctcaccctgtggggccactggctgtttacagtccttccctgcactgccctggcctgtgaggcgaggagtgttatcattttactcctatcgttttactgaggttcagagaggctgagtgactcccctgaggccacacagccaggaatctccagagcaggaccctgacccatcccttctgcatccagggcacatgacaaccgctcaaagccgctctctggcccctccaccccacactctatttacagcccagcacgggccagggctgcccaggaggactcagcttgggttatcaccttctgacacagacgtcactacccccagccccgcgtcctacagcctcactgggcccactgccctgcctcccatttcctggaaaggggcatcctgtaggaatagatgaggtcctgcttgccatcctcccgggccctgtagtggcccccgaccattgctctggcttgggaaaggaaggaccaaaggatttgattatttctctgcttggccacccctggggtgtggttagccctgagaaagtcactttgattacagagccagggtctcacatgaaggctgaggtgaggctccatggtgtggaagccgcccagaggtgtcagggcccaaggggagctttgaccctgtggctcccagcacccccatcctgctgggaaatgctagaaactggagtatgtgagaaccgaggggtgggagggagaaaatggagctaccgagcagaaaccgtttccagggcttctgctgaagtgggaaatctcccactccatcgagaaattatttaactttcacgctgccttcctgacagtgaggctcgcgtgcccatgccggcttgcttgggagcgccatacagcgccagctgtggcatcagctccccactggggaggcagtgccagccactttcctgggtggccgggtaagagggggtgagagctgctctctgaaggctgggacaggaagagcccccccccccccaacactggccagctcctggtggacacaagtccctcctctccccgagcattggaagaacaataatgccgttgccaagtcaaagggctcacaccatccactgcccaaggtggggaagggttcacaccatccattccgcagggtggggaagggttcacaccagccactgcccaggatggggaagggctcacaccatccattccccagggtggggaaggctcacgccatccactgcccagggtggggacgagcaggaaagaggctgaaactgcacagcggggaggtaagcgttggatctggcagctgagctgcacttccccacagcccaaaatcaagcagtcctggcttacatgaagctggggttgtatcaaaacaaaacaaaaccacaccacctggtgggcttgataaaaacatccggcctctggcagtggctcatgttgcaatgccagtgctttgggaggcaggtggatcacttgagcccagaagttcgagaccagcctaggcaagatagcaagatcccatctctacaaaacaataaaaaaaaattgccaggcgtggtggggcacacctgtagtcccagctcctcgggaggctgaggcagcaggattgcttgagcacaggaattcaaggctgcagtgagctgtgatagtgacactgcactccagcctggctgacaaagtgagaccccgtctctacaaaaaacaaaaaagacaaatgtccggccaggcctccccactgaggttctggcggagaagcccaggcggagagatcggcatcttttccagcttctcaggtagggcatggctgcaggacacggaccgcaggttagggcaagctgcgggcctcacggggccctgtgtgctgggggacagtgcttgctcatcctagagtttttctagagaaagccaaaatggaaaagcaccactccggggtcagctccagcctcactgagcgtccacagccagcctctctgagtctcgctgtcacatccatgagcagttcctttgacacccctcgcccgggtcacaccgtcagtcaccgccctctcaccctgcgcctctcctgagccagcagccataacccccgccccgcccggccctgccccgggctctgtggcagcacctcctgccaggagcaccctcagctccctgcgggagcacgcagcaacagaggggagggggtgtggtcccgcctcgcacgcatccccgctgtgggcggcccctcgctgcgcctcagcctctccctggccccacgggcctccacactcctcacatacagaatgggctgtgggtcctcagcccgtccggaccctccgctcctttcctgctacctccgtgcgcagcaggccttgtggggtgtggtccagagcgtggccccggggtgcatcgcgctgattccactgcaggcgggtgggcccctcaggaagaaaactactcaacagacgcggctgctgcatgctctgtgtggagccacctgagtgttagactggccaagaccacatggacaaatgccacctcggccaggccccttgctcctggtgaccagtactcatggacaccagcacgctgggcagaggctctgagtaactttctcacaagccagggaccctggacagcctgcttcttcctccttgcagaagaggagagggccgggccggcaggagtcctccgcagcagccccaggtgccagtggtcagtctggcaggatggcggctgtgtgtcccgagtccagccaggacacggcgctggtcccagtctcattagctcacgtcgatgcgtcctttccaaactggcagtcagtgaggattagtccccaccgacccgatgacccgggctcctttcgcgacacagggcaagggctgacagctactgtgttgtgatcaacagtcccctgagatttcactaagctcaaggctttcttaatgcaaacttaaaaagcttttaatgtatgttaagtagataccagctacttgtcagagctgtggttactgaggattaattttatagctgctacattgctcatcaactgttacttgtaattagcccttataaatgtttcaaaataatcagataatatttgaatagcttaagtaaactgtcttactacctctatgaggaaattacgtgtggaaagctataaattgggaattgcaaagaggtaggtctgtgcaactggctggtgtgagtgttgagttgggcgaaacccagctgctacctccaggagaaaaaggttaaatacgcttcataatataagaggattattttaaatattcccatgaatttctggagaacacgagcaagctatgaatgttttgaggcctcaattccctgcaggctggtagggactttgcattttagagtcgatctttgtgctaaccgttaaccattggcacctgtgcccagagcctgggcctgcgtttccaggtgggttggcatcaccctttgtggtctggagaggccagggggctgctctctcccacgtctcaggagatgcgtcctgggctgctcctccccaccaggataccacactcagcctgggcactggggataggaggggtgctggggtatctgcacaaagggctgttgagctgggcccagggagctcctctccatctctcctgggtccttcaagcccctcccagggtatccccgctcctgggtgggcagggcgtgggcccggtcacagcggtaacagatttccttcccgtgctgccttcactgatgctcagcccaaaaggccagtcacatggtcatggctgccagcctcataacaccacggtccctgcggggcctcgagtggggcctctgcagtggctctgccccgctccccatctctcatgcaacctccctgagagcccagggccatctccgcttgtcttcatggcccgtcccttcccatgacccgctcggctgcagcggccctcggtgggcacagtcaccgggccggcttccccgcctgtgcttcctctgaggggttccccagcccacagcatggtccagggccgggtggggccagcatcctctactccctccttgaagcctgtgcagggctgcatcttctttgtgtgcaagcaagcgagcggcctgcagccccaagggccctttgtgagtgctgcaaagccccgaagaccagaccgcactccctcgagtgcacacacggtgcttctgggaagctgcccggccgccaggggggcagagctcctcgccccatgaccgggcaggggcagttctgcgtagccgactctttgccccctccttgggcactccctttagactacgccaagagtcccatgcccgccgcagggctgacccagcttcagggccactgtcactgcaaccatttgctgcactcttaccttatggctccacgggggatggtgcttctcccaccactatccttgtgaatctcctcatcgccccccacagaaaggaaatggagcccagagagggtaaaacacctgcccaaagacacacagccaagacagggcagagcggggctgcagtgtgagcccttcagctccaggaccactgcctgcccttaggacctgacaaccttaagtccccaggatatgggcagggggctcacaggaagtgctggcagtgcccggctcaaggcagagcctcaggcaggccgagagcacagatggcctcttggacacaccccaaggggccggggctgggagacagatgggctggaactccctgccttcccttgcctgataacaggcccactggggaccctggggcgtgtaacctctggcactccacatccttagagcccaccagtgagaatggccagtgtccactccacagtggcctcgggcccatctgcgccacacatagggtaggcctgggcatggctgcagggccctcctgggaccctccaagcatcttggttgggggcagctacgaggggcactgattgtccccttctcatctgtcagtttgggcactgcaaccccaggcttggttttcggtgggggcttgagaaacccaccttctgcagtgacattagtcctcaagacgccacagcaccggggctcctgcctcccgttgggaggtgttgagggcttggggacaaaaggcatggacagcagcacctctcagtgtctgcaggctgcagcgggagagccggcagaaagcagggtggtcccccgacacctagacattgggggagtggggtcaggcagcctctgggcagggccagggtgtccagccgcatcagccaagcgtctctctagggttgagggcatcaaccacaaacactggtgtgtgtggttaaagccatggaccctcagagttctgagacgtcatcccgaagccacctgtcctcttctttgtgtctctgaagtgccgaagtaggtgttccttcagtggtcactccctgtctgtgtgagttgccgggagctgctgtcacaaatcaccacaaaccaggtggcagagaacagccccgtgtagccccacatggtgctggaggtcagagtcagaggttagtttctgtgggtcaaagtcaagggtcagcagggccatgctcccactggaggccctaggggaggacccatctcctgccctttcccgtttctagaggctcctgccccacctctgtggctcctggccccttgctctgtcttcaagggcagcagcacagcctcctccagcctctctctgctttctttccacatcaccttctcctctgtagtcaaagctccctctcctgccctccataaggacccttcacatggccttgaggggcccctgggaaatccaggatgggcctcatctcaagatccttcactccatcacgtctgcaaactctcttttgccatggaaggtggcattcactggtcccaggatgagaacccagatgtctctggcagccggattcagccagccttgctgccataagagaatgccatggagttcccagacctgtaagtggcgcaagagcgggcctcaatcaggtctggtctctgcccctttgtccggcaatgtcctcaagccctccccacctttctcttataaacgaggatgccaaagacagctgcattcacagagcacctccttggagccaggcccaggcagacccctcctcggcttcattcagcccctgtggcagccccagaaagggcgctacacaccctgatcatgctctgttcccagcagagacaacagtctcagagaggtcaggattctcactcaaggtcacacagctcaaagtacagaactgggctttgaaccccaaaagtcagactaaagagcccaccctgcagccaccctgctgtgtgtagccgagaacctcgtgggggtcagttgtgcctgagaaagtatgtgaggaaactgaagctcccccaaaatcgtgggggtggccccatcgtccctgttttcactgtctctgagttagttgtaaagaaaggaatttctctgcagagcatcgctttgaaggaaaacttacttggggaaaaaaaaaacaactgtctccgttgggagcaatttccaaacgggagtccacgcgtgggtttttcgcttgctgcttcaagcaaatcagccattttcactgcagaatggctgcaaaggaaatggagaaaaggcagagcgcagccctgggagctgcctcccagcctgggggccgggcagggggaaacaggtgccacctgggcctagacggggcgatgcctgggaggagaggctggaggaaccgggccttcccaccacggggccctgtctgtggccaccgccgtccacagaggcttcacaggtgcatgcagcgttcctccccgtcctcctggctgctgccttttgcgggatagtcgcaggctggctctcgctggaggggcttctccgaattctgtttatcctgggtctggctctctccaacatggcagctggggaggcagaggaggcggcgtgtctaccttgtcactgccggggcctgatttaccaacaggtctggacagcgctcccctccttcccacgcccccactgctaattgcctgcctgtagagcggccagccctgtctcagcagcgcggcgagtcgcagctccgtcgttgacggtgtgtccgcgatgtgctgtggggtcccgtcgtggcggctgtggacgggctgaggtcttcctctggatgctctcagagtggcagggagcagcctgggtactctccacgctcggcacaatccgcccgggctggcagttagagaagccaggcagagaagtgcggccagagaggctgtccaacccaatttccccgggctgggttatttgaaagtctaaaactccctaataccaagagacgggcggtatttaaatttaagtctggctcccaaatgaaatcttttcgttcaactgttcaactttatttggaaatatgaaatggtaacttgattacatgttaaggtagctttggtcgggggattagagccgaaatctctgcccctctgagttcatcctccagcgaatggaatccatccaaattaggaatcagttctgctaccgcgggcgagccgcaggcctggtggcctggagggtggggcatcttgaggctgcgggattccagttactctgcatggccaggataagggggcgcccagagctctgcgttccccaagggaggttggaaggaaacgttcaactgtgtgcttcccagagccctagcaaatcactcgatgtttataaactgtcagtgaaagtcatttgtaagaaaagctccatttccagtggctctgcagcttagaaaactcaaaactgaaaaacacacgccacccaggaaggacaggagaaacgagaacaggctccatcgctgcagagcgtgaggccggcccccgctgcgtctgcttccaggaggcggtgccgagacggcggaggtaatggaagcagaaacgagtgaaacttttttgttgtgtttagcaagtatctcttgtcaaggaagttgccaaactcacaaatgttcttgccaagagagaggcgcctgctctccacacgagcttgttgttggtaaggaggcacgacagaaaacgtgtcaagctgggacccggagcaggtggtggaaacagcagtttgcaggatgtcggtcctgcctgcatggcggcctgagagccgcccgaactgctgtgctgaggacggggctggagattcgccctcaggtgaggggctggcctctgcaggttctgttttgtctctgaggcatcaccagacgggtgtcaccagccacatggtgcaggtgaggagacagaggaccgaggcgggtagaagtgacaggagaggcaaagagctgtcccctgcacagccactgtccatgctgtctgaccacccctctccgccgtccagcctctgcatctggcctcggcctcacccactgctggccaccagtcacctggaggtcagccacacccggggggcagctctgctgtctggacctctgagccacaccgaaagcactcagtcccccttcctcctgaagcctccaggtcctgccctctccttaccatatgggttcccctctgagcatccctcctgtctcctctgtggacctgcccagctctcgcctggtgggtgtgtcaggtttctgctgcctcagtgtggggatcctccaggggagggagtggccgtagcctcagaagtgcagggaaagtccagaggggagtccccgtgtggaggcatcaccatctaagtacgaaaccagaagaagagatggctcagaggtctggagtagaacagtcaggactcatctgttgcaaggggcagaagccaactctaaaaggcagaggccagtgaaaagtgcaagatttatggggcacataaacggaacatacagagctgtcagcttcaggcccggcaggatctaggcgctcagacaatgccagagtcagcaggcgctttcccctcatcccgcagacctgccgtctttgacattagccccggtctccacagaagccccagcgccaggccaagagtgcatcccagtaactccaagttcgtggaaagagaggtcctttccttcttgtcattccagcaaacatcttgggagtgactcattggctttgatgggctcatatgcccagccggaagccggtacggtgctgagaagactctaggctctgcttggccagtccttgacccagccccccatccctacccaagctactagaacagagaggagcagagaagaacagctccctaaggatccctggggtgctgtccccagaagaggggagagtggacagtggacagtgagcaagcaaaacaaacaggcatctgctgagaagtggccaggatggcctctgtgttggcagatggaggtgggcagcatggctgggtgtcccacagagccacacccgagccccataaccataaaggccagcaagggtcagggccacctttccggccaggcacaacctttccgggatccagagggtacactcccctgcccggcctcagacactcgccctcctgcgaggaaacacaggctcctgtgtgcagcacagagagggcagcctgcccgggggtctcggacccaccccaggtcagaatcacctggggagcattcgactgcctgatgccacccaacctaccgcatggcagaggtatgtttaaaactcccacgaggccagggcagtgtattgggagatgctcaagctcattgatcatccgtggaaaacaaactcagggaggggccctctcacaccggccatcaccccaagatcatccagccctgtggtgggtgcatgagttgtcacagccagagctccacaaagcagatttaatttagaaagagccaaaatatgggatcttcattgcccggcagttgccagctatgtaggtatatgctcaggagagacccaccatcactcactcggtgtccactgtggtgctgtggaaagctacgcaggcccgctgggaggtgggtgcttggggcaaggggaaggcaggaaacctcgcctgggggctccttccgctctgtggcacccagtactgaaagcattgtggttcggggcacatttagaatggctgcaggatgtcattctggaaggaattccacatgtgtgtctgttctaggcaacagcctattctgtaggacagtgcggcagtgacctcttagtagccaaaaggacccttgcgtcttcccagatgtcagagccaggcgtcgtggcctgcctgcctgactggttgggggtggagtgttcttgtcaccactggagagatgaggaggggggcgtccacagggctaaggaagcctacccaaagcctcatgcccaggacaaggagaccaggcaccaccacctcccacggggttaggaacacacggggaggaccgtccactcgcctgcaggagggcaccagaaacacagtttgtgcggccgtgcacacccagggtgaggaggtgccctgttaaaagggagtggggaggcaattccatacccaagtgagcatctgaggaacacgtgtgcacacacatgtccacgcgcacgcacacacatgtccacgcgcacgcacacacacatgcagtaccatcggagcaggtggagggtgggggctgtagcagaggccggactggaattgctcaggggctgctggaggagctgcctcacctttcccttggggctgtttaattctgcgggggaagtgaggacacaggaggaaaccttggtccctgccacggctgctgtgagcagacatcagggacatgttcatcaacatgcatgttttgccacacacatgtgcacaccgtctctgtgagtgggaagtgtcagcatctgggggtggtgttttgtgcctgttcctgtctcctgctggggaggggtggccacagggcctggaggacctgggtaagagccgctgcactccaggttttcccgtaatgcacggtacagagatgggggcttctccaaatcacagctacactttgacaggggatctttttttaactactacaaagccctctaataatgggttgctaagaaactgacacaggagatgattttgaaaatgtctcgctcatcccctgatctatgagctcccagggccccgcagccccgccagcccccagctgcaaggccagtggggcaggtgccgggagggcctcgggaggtgcctggtgggtcctgccagacagaggagtggcctgtgggagaactgccctggggaaggaagtcagtgatgttgtagagactgggtgttgtccagtccatggagctgtattcagaaccaccagggccagacccagccttgctgtggccccgctggggtctttggatctcaggagagtgggcggtgggagaggattccctgagctgtagagtttaccctcagcttctcgtaacagggtgtctgggtacctaaatgtcggaatttgaggctattcaagttcaatgtgttggatttggaaatctccctcctctttctactccatctcctcccggctgggaagttgcagccctttctccccgtcaaggtgcagctgtgtccaccatcagcgaggggagtgtgaccaagggcaggtgttccgtgcagggctggttggtgtgaggccagccacagagtggtggccaaatagcattcggggaggtaaacagaagattgtgagaacagctggggaactgtggacggctcttcagactcaaacggtgtgatgaacaaaccgactcggaaaatgcctggcgccagtaggaggcccagctagctgggagttctgaaatataggaagggaagtgataggacgtctctgcacacagcacatatccatgcaggatggtcagtactgtcgctttcgttaggttagaggccgtccactgggcagcaggctgtgggcctggcgggatgcaggcacagcgcgatccagcacagtgctgggtggtctgggtgccgcctcagggcaagctgccatagcagcgatgagcccacacacgtctccagccctgacaatgaaccagtaatccagctcctgggaatcccggcacaagggagctgagaccagcaagtgtggtcagcatgcccctgccacacagaagcagcatggaaataaatcctccttagctgagcactgggcccccacagcctggggaaggctgcgggggcccagaaccgtggctctggcaggaacagagctgcaagccccaccccagccctgggttcaaaatcaccccgtctcagccagtcactgaggaatcctcacttccagaaccccactttgatttcaaacctaagggatacaatctgttttcttggacttgtttcaaatgtagcaacaccagctgcaaaaataaataaataaataaataaataaatttaaaaaaatacagctacgtctctgtgcaaagacacatttataatcactccgccctgcagtcggtggggaaagcctccgtgtagacttcattttgagtctgtgggcacattaaggacaaactctagatcttaatgatgtgtaggttttgtctccagccctggctcagcccctcccagatcttgctacgtttcggaacattaaagggaatttatgcaaaattcctccttaatgtgatttgaaacagaagagcagccccacactggccctcggagcagcttctccggcagcacgcccctccccaggctgtgagcctgcaactgcctttccagtgtgggagctgctcccgtccaacccgcgttcctgcatattgtccagtccaggcgctggccaagggcgagtgtccacacccgcccgcctgccccctccacctttgactggattccaagaatactcttgataccctgatgtgtttgtttaaatcaacttcttttttaaactacagacgttgattttcgaggacatcttatggagtcattgtttaacaacaacagcaagtcagtagccataaagataatgtgactttctagattaaatacaatgtcaatacagaagtcatgttattgtctaaaatgagtgtgtgcccacccaccacagaaggcatcccgagtcccagccacagacgcctggcaccttggaaaatgcccgtgtccatggctgcaggcacgtggccaggggtcctctggacccagacctttgattgggaattaatctatatgtgatctgattccgcgaatccgggtggtgtccttttcttgtactattcagacgtgtttctaggaaggacgtgctgtcatgacccgccatggtggtcccggggatggtcagcggcgggatgatgggtgtgatgtggtcccggggatggtcagcggcaggatgatgggtgtgacgcatctgtgctacttgggattcaaattcatctatgatcttaaatgtcgtggcaaattgcaaatgacacccaggaagacaagtttacctgttatctgcgtggattacataactaaaaccaattcccagttccaagtatcctgaaaacaagtgacatctcattaaagatcaaagtcccagtatgctggatgattaagtgtaattatagccatacatactcgacacgggactaatgagtgttcatgcttggaggagggaaagcaggctgtgagcacacaaggcatggctggatcccattctggatccgcctatgccggggactgcatgacaatgggcagatgaggaggccaaagctgggaactggagttttaatgccaggaggggttccggtagaaagcagctattttctaaccagggcggtgtttttcattgctgggaggctgtttggacgaaggcagaaccttccatacttgcaaatgttacaaccaacaagtacctgagacaaggcaggtgtctagagtgaggacggtgaggtcggagcacagcggggggtgggggtcactgcaggccacagaccgtggtgaagagcgtgtgcattgctctcagtggcacaggaggctgttgcaggcagtcaggggaggaagatggtctggctgccctgtagaagaccatcgtatcagttggtgattgccgtgataatcctgcataacaaccacccataaaacctcagtgacatccaaccacaagtgtgtttctcacacatccagaggtttggctagcgttggtcagacctggacgggcctcagccggggtggggtggggggcacctgagcctagacctgttctcaagacggagacagagatgggtgagggaggccgggccagccacactaacatcccactggcagaccccgggaaaggccatggccacccacatggatgtgtgggtatggccacatgtggctatccaccgggccagtcggggcggctgtgccaggctgtcgtcccccccatgagcctgctgtgtgtgtctgtgacagagttccttgtgccattaccaggactcttcccagcaaaaactgccctcggccaagtttctgacctgggttctcagacccaagttctgacccgggttctcagacccaagttctgacccactctgctcacccgcagtgggaaggagcaagggagcgtgtacgggaaccagaatcagggagccacaggcacacaggaagcccgagagagccccagcccgtgtgcccgcctcaccctgcctcctgcctcccgccctgctcccatccaccactaccaacacctcccagccccctaacaagccaggaaccactccagggctataaaacatttaattttggaaaaaatcagtactctgccgctagatgacgtgtagccgcattcagggtctggctgccagggcagaaccaagcagggcccgcagtctgcaagaactcctgggacccccagatgcctcggtggtcacttctccagtctcagctgctcaacagagccactgccccttggcccggcttctccagaacgcagccagcacagagggtatggccgctccaggaagcttcgagacgggggctgcaggagcctgcagagcctgcgttatcctgcactgcaaatgatgctgcatttgtaacgggagctagaaaggaatcagtcaaacgaactcatggctcttcatcccctgcaaaactaatggcgcggtgctgactgccgcatcctcagcagccgcgccacatcctcagcagccccgccaccgcctgtcacacctgctgctctggaagaacaacagaaaccacatttccaaaaaaccaaacatccccaaactcttagagaaaaaaaaaatgcaatccctgctgaggatgtgaaccaggtgaagtgaagaattgctggaggaaacatccaaacggcttgaactttggcaaggagcttttcctgaaagctgggatccacatgccggcagcccaagaccgccctcatcgggggtgggaatgaaatgccccttcccggcttacacagacacagcccaggagaaaaagcagtgaccatttgcctgaaatcaagatcacacttttgacaatctgaagcaaggaaaaaacagcagacatctatctgtatgcttttgccatgaggaaaggaagctcatttcagagcagtggaatcaaccagttagaaatgggaaaatggtggttccctagcccagaacatcccagggctccctggccttgccagtgctactgtgtgaaagcggagcccaccagcccacaaatgagcccagccactgccacccggggtcacgcccctgccacccggggtcacgcccctggctgcctactgagcttttttttttttttttttgagttggcacccccaggctggagtgcagtgccacgatctccactcactgcaacctctgcctcccgggttcaagcaattctcctgcctcagcctcccatgtagctggtactacaggcacacgtcaccatgcccggttaatttttgtatttttagtagagatggggtttcaccatgttggccaggctggtctcgaactcctgaccgcaggtgatccacctacctcggcctcccaaagtgctaggattataggcatgagccactgcacctagccgcctgctgtccttcagactccccgcctgggcttgggtttgaggccctgtgtggttttcccatctgcccgccttcgtctttcctgtttctcccccgctgcgggggacacagcactctcaccgtgccttagttcatctgcttccaagggtggctgcctaagcttcactcaggttttctagaagcagagctgagactggggtttaggggcatgttattgggggcggggtatcagggagggaagtggtaggggtcggggagcagctaagggagggcgtggttgcagccagagacggtctcagccccatccctgccagagctgaggagcacaggctggcctggggtccctgccctcaagccgtcactggccctgggctgctgggcctgccgggtggggctgccatgggccaagggcagctctccagagatggggcagctgtgagctgttaacagccagcccccagcagctggagaaggggttcgctgcccagggaaatgggtctgggcctggtaccgactgcaccagcttccacctctctctttgacgtatcctttaacccccgagagaatttcagccaccatacctggtctgtattttcagtcaaaccatcgcaaacatagtcttaaaatttcatgaacacattccctgcccctggtatgtaatttagtcactgaccaacagatattaactgcagttatgtagaagattgctccttgccagccaacgccctttggggataatacggggagttggggcttggatgtgtgcattttccacgatttgcatttgtacaaaatgcttgcaacctcctatccctccctcaactactgtatcccaaatacgtggaggggttgtgctctccaggccatgacagccatgcaagcttcttcctgcaggccacctgcacagccaggaacagatgaggaaaaatcacagccgcctggtaacacacaagccctaacatgatgaccaaatggggactctgtggggaaactgcaagtccagacgtggtggaggcgccctgccgaggctctccgggccgcagggctgggagtctccacgcacacatgggaggctgactgcgaaccacatcccgctgccttccttttcaaacagagagagcaaggttttaaattattactgccagagatttcaaacagaatttctaacgtccttggcaaactcctttggtttttagtattaccagtgtaaacaagattgtggtggggtgaccagttcaaatggttcacaagctccctccagctccttggaggtccccagcttcgggccgggatctcccccacccagggccacaccctcgggagtccacgtgtgtcctcactcccttgaggagtctggagtaatgtacttagctaccaagcactgggcccctcaacctgcccctccccagtgccccacatgtgctgatagcaggagctgggggatgaagtgagcatccctgtgaggactctggggacattctctttccaccaatggggacctgaggctcagagaggctgtcacttgcccacggtgtcacagctggaaggcagtggcttcaaacccagatgtgtaattccaaatgctgtataagcatcgcatccccagcttctggggctgggcctggcagggagggagcggtcgttctgctggctcagggctgtgtaatgggggctcagactctggctgtcggaagggcaagaactgggtgcctgggcctctttcggggctccagcttatttctgtttatttttattttctcaccttgttccctttccctcgacaaagcttgactcttcccaggaagctatgcccaactgccagggatcccatagcctccttggctcaccagccctctccagtataatagattaccaacggccctacccctgccgcacaaaccctgcacagagggtggtctccagtgcccctgggagcagctgaggccctggcccaccttgctcaccagggtctccccagcccaatatgtagcaggagtccatacgtgtctggtgcagggctggctcccaggccatccccattcctgagaatgcagaccaattgttccaggcacatccaggccagaggagcccaccccaggtgccgggcccatgtgcagcgtggggaggggctcagtacggggagcaggtccccaccttcctgctgagtatggtaacctgtgtgtcctccatctgtggaacggggacaggaaaggcccactttgtaggcagtgaggcctgatgcccctaaggccaccccagggactctcttaggaacctcacgctgtgaccctcccaaagcaaggcacaaaggcaagcaatttgccccaggtcacactgctaggaagtaggggcaggattggaacccaggccttcagagacacctgaagggccctggaaaacctgtccctcactgtgggccgaggctggcagatctgcccaggagcttggcagcattgacctgggaggctgcggccgctcgacgacgatccctgcagacccagcccctcacacccacgctcgaagcccccaaaataacttgcagaaaacttgtttgtgcaagagatggaaggcagagctcatgtacagagacaacatttgcagtgtgcaattaagctgctttgcagcgatgtggaaatggacccccgttaaaggaatagatccactaaatacatacttaagatactggagtgtttgtaattgctatcttcataaattcctgatctcgtcatgcttctccacaggggcgatgagcacttgatggagtagcttctgaatgtcctccttgctattgagcaaacagtctaacgaggcagtgctcacggtattcgtggtaccatgttgatgccgacctttccttgcagtaagcctcccagggaaagtcagtcctctctgatccctgcaaggtgctgaggcccagtctccacagcatgaattccatgagctcctcccacgctccgctccccggctctgcaaagcccagggtgttctagtgcccgtgtaagcataggtgctgaggttgggaggcacccctcaaaatgaatttctccctatcctgcctggctttccgggaaccctggacctctgaaatcattgaataggatgctaggaaattctgcaccctgagttaacttgggttccctttaatatgttaagcacacagtctctgccctggattgcaagagataggactgggggaggtggggcagaaaaagctagtggtggctgagctacgtacgaagtcctgtctaaccccaaggccacgatcacaggcctgacacatccagccacgaaaagcaataacagagcatcccagggtggctgctgtggagggcgtggggctacctgtcatgagtctcgtgtacgatgctttgtgcccacgaaggatttgcccaggcttagtggcctctgtgataactccagtaacatctatgctggtgagcggggaagccgcccgtcgctgttttctagaacaatcagagctcttcagctggacttcaccctccaccacatcggcccagggaggctccgggagacaggaggaagacgcagcctctgtcctgagcctctgaaggtaaaaccacatgaaatgaaactccctggattgcaggagcctgaagaccccctgatgaaacctcctcagagtagagagcccgcctggttggcatctgttttagcaaaggtacagaagcagcctggaaagctgagagattgtgctttcgacgcccggaggcccggctgagggaggtccaggccagaattaaaataaaccaaaggaacaccggttttctgattttaaatctttgaaactgttaatcctagattatcaaatgcaaaatatgccccagccagaaatgcaaagctcccacttgcccaggtttggaaccaggactgtgtttatctgtccttggttatcctggctgctccgtgagccgcaatgcccgcgttcatttgttaaagcttccacttctctcaatttacaaaagaaggtttaaggaagcaatttcacttggcctcggcaccaaggagcttaaagtcgcataaacccagggaagctgcatttcagaacaaactaggaggttccccaagcggctcccaggaagtccaggagcaagcaccccgcagaagggcagctggggggccctgggtttgtgacctggagtctgtcccgtggcagccttgggaagaagcaggttatctccaggaggtgccaccatcatcttcccaaacctaaacttaacaattgtctttgctttcatcatcatttgcctaataatatttcccctctgtgatgttcacagaggataaaacacacagcaagattaaagagttttctcaaatcgctccctgattttctaaatagaaaaggggccattctggtagcagagttcagctgagattcttaggaaaaaagcgatggagaattctattttccactttcttaaacaccaaacttattttcttttatcctatgagatgttaattcttataataactgaggctattatatatgtgcaaactggagttataaaaagtagctactatcacagatagaacccattctctctgctccctgagacttattcaaacaactgcttgagccgaaatacgctccatgtgtttcctgccatgggtgagtggctggggagggctcagaagccaccctaaggcaggcgggcattggaggggatgatggcgcttgggtgaatcgcacgttaaatgggggggggcggtttgtgggtttgccaagggggcagacaccctcacaggcctcaattcatcacctgccacaccagtggggcatgacccgctgctgacacagagctgggcccaggcctgggacactcccatcagcaggcagccctgagctcgcccgcatccccatccccctgcccggtggggacgctcaggggtcatttatgtttgttccctgtgtgtgccacccattctcatttctgcaagttaattcgatatcatggcagtggcttggggtaaaaggtgccagagaacaccagacagcaggcctgcacctacaggaaaggcttggccgccgcatggaagagcatctgtttccgttaaagtgaaatgttcactccttggctgggcacatggcgacccccactttgtctgactgtgtttcaccagccaaccgctggtcctctcccaaacctgctgatacctctatcccctacatccttgggcgcagccctgatacctgagtctgaaccccaaatcacatgtttatgtgagctcttgcaggagcaagatcaggaccccaaggcaggggcccccgagtgagtgcccctcaccgggcccagccccgctaggtcccgggctgcacccagctctcacctctgtgccttgctacgctgccgcctctgcctggttgctctctgggcttagcctacccagatccgagctctgccttgttcccagttggtccgggaaggcttccccaccccccaaatggatctgctggggcctgaaacactcctaggcccacacaagacgcggaaagcaacttctcgcttttttttttatttttatttttttaagagacctcgttctattgctcaggctggagtgcagtggggtatgcgctcctcctgggctgcctgtcctgcgcactttgtcaccttcccacgtgtgctttcttccacactgaacagtgagtgccccgaggtcacaggtgtctgcgcgttcatctctgaatccacggctagctatgccggggcatccacacgtgccgcctgcctggacagtgggtcagcaaggtccgttcccaccagcagggaggaggccaggctgctgagagcaagggcttgaattaggaactgggttagagagtggaggccaacgcactgcgaatgcctgggttgtctcccaggaggccatagggagccagccagggttctgagcagcagcaggacacacgctgagctcacagttgggacttcttgacctccagtaacccaggaatttggatcttgcagggtttcagatgaaaacagcctcacacctggggcagctgccctgtcacctgcactttcttttttttttttcttttcttttctttttttgagacggagtctcgctctgtcacccaggctggagtgcaatggtgcgatcttggctcactgcaacctctgcctcctgggttcaagcgattctcctgcctcagcctcccaagtagctgggactataggtacacaccactacgcctcttatgttttgtatttcagcaacactatctcacatcacgcagacagtgaggagggcttggcttcgaggctgcatgcccttgctggggtgtgggggaggccctctctgcactgtcctcccaacccatccaggcctgattctgggctttacttggtgagaactgccttccaggtctctaggtcagaattccaaaaagtgggaacttggctgggtgtggtggcccatcctgtaatcccggcactttgggagctgaagtggaaggatggcttgaggccaggaattccagaccagcctgggtaacatagcaaggccctgtctctacacaaaatgtaaaagttagctggacatggtggtggtgtgtgcctgtggtctcagctgcttgcggggctgagacaggaggattgcttgagtcccagagttccaggctgcagtgagctatgattgccccactgcactccaacctgagcaatagaacgaagtctcttaaaaaactaaaaatttaaaaaaaaaaaaaaagcgggaagttgctctccgcgtcttgtatgggcctaggagtgtttcaggccccagcagatctcttggggattccaggatggtgggcggaaaggagcaggtgggctttccaggcagccctctgtttatccacaccccctgcgccaccccacccggcagtccaagcagaaggtgacgcatgtcgtcctaactgatggcacagagagcagggggctctctcggacctctgcttatcctgcgtcccagcctggcctgcaggggctgcttagggtgagcccttggaactgtcgggagacctgctggcactttctgaggtgggcagcacggcaggagccatgtggctgcgccccacatgccctgagcagacagaggaccctgtccagatgggcttttgggctcactgctgcagccctttcccccatccttgagctctggggtctttgtatctgcaaggatgtcacctccgcttcccagatagaccccctcagacagccccacggccaggccctgtagggaccaaggtaagtggacacgagagtgcatcagaagccaccgcagggcagctgaaccggtgctggcccagaaactgcccccttctaagaaagagagagaaccagagcacatggatgttggcacatgctgctcggcttccagatgcatgagcacgcgtcgctcgctctgccccgggagcgttccatgcattcgctcgctctgccccgggagcgttccatgcattcgcattctgcagcctccctccacactgtgattttccacgtctccccaaatgcgtcattaagatgatcacatgcatttacaaaggcggccgggctgcagcccagcacccgcttcatgatgacagcactgcacccccagcactgttttgccatgatttagtacttgtgtacaccagttataagaaagtatcacttttgatagccttgtgggttttctcccctccgctgctgattggtataatttatatgaaggctctaagccccctgccaggctgggactgctggtgatacacatataattacaaacccttcttcccagctttgtgaacttcgaggaggaaagacgttttaaaggtgctgttttagttgtgctgatgaaatgcatattcatttagggggcctggtggttatttagctgttattgttcagcaggcctggtcctcaggtaccagaccaggcaaggagacacagggtgcggggctgctgatctgatcccgcgaccttgagctgtgtgcacacctgcccgtgaaaggccttgagccaagcccaggggtggccacctcctgacttttcccggggaccgtgtctggccacttcctcctcccgcactctcccatcccctcagctgcaccttgcttcagactcggggggtcctgcctcccgctgtggcttcctatcctctccacttgtcttcccaaaccggttttgcccagagggcccaggtcacttggcatccccaagaccgccttccacctacacagcaaccagcggctctcactggctgctgcctggcatgagaacttggcatccccaagaccgccttccacctacacagcgaccagcggctctcactggctgctgcctggcataagaatgccctgtgtccgtgggggacgtatgcagccactgcagataccactgaggccaggctggtgatctgagggacagccacgcagctgcgggcctccgggcacctgcccacctcaaggccttcacattcagattttttaaaacctgttctggtcaaaccaaagtcacccaaggaggctcctcagcagccatttgcccaagggtcactctgtccacaccgatcctcacgtcaccctcacagcagtcccactgcacccgctgagcagaggggagctgaggcggagggggcaggtggaagttgtggccaggccacggggctcccacacagcagtgccagcatcgccgccccccatccctcttgtgttcttgccctcgcagcccctcaaggcctggaggcagctttgctttgaaacccctgggttactgcatacaggagctttcccctcccaagaccctcatcagctttctgaagccaagttgcctctgccctgaccttcaaaccttcccaggatcagctcaaggcagccaggcagggaggctgtgcccccttcaggcccaggaccctctgtccacctggggaaatatgacatgcaggtagaaataggacaggctttgcggagtgaaataaaaatccttaaaatcctgttgtgtcctgggctccaggtacagtgctgggcctcagcatatcctgtagttctaggatttgcggggcagttcccgctaccccccgccccaaagctttcaccccctgccagctcccactccccaagatcccaggtccctagatgccactgtcccgctccctacccagcctccacctcccagatcccactgctccagtcccctctcactccctacacagcccccaccccagcccagatcccactgctccagtcccctcactccccatgcagcccccaccccagcccagatcccactgctccagtcctctcactccctacacagcccccaccctagaccagatgcactgctccagtcagtcccctctcactccctacacagcccccaccccagcccagatccactgctccagtcccctctcactccctacgcagcccccaccccagcccagatcccactgctccagtcccctctcactccctacacagcccccaccccagcccagatcccactgctccagtcccctctccctatgcagcctccaccccagcccagatcccactgctccagtcccctcactccctacgcagcccccaccccagcccagatccctgctccctgatgttccaggaggcagaaaggtccagtcctgcaagtgaggaggacgcagttaaggagatgtcacctcagccaaaactgcttccccgggttttgggcttacacctgtgcttcctgaaagacccttgggggggtctactttggatctacaggaaggttttcctctcctgggaaaagcaaaggaaaaaatcctacaattgtaatccagctcaattttacaaccatttcccaggcacctggatggcctgggtaccatgtacccgagagagatggcaggagataagtgttacccagacattaatgagtaacacaccctgtggttctccagccaggtgggcccttcagggcaggctctgccccgcctccttgtgtggggtgcagacaggattccccaggctcttcatgagcaagtggggagaacgttccacccagcgagtgatgggtctgaaagtgatttttggcttggatagttactagattttgtttttccttctttaggaggaaggtggggctctgcgcttttatttttaaacttcatctcattaatgatttacttatttgcagtaactctgccttcagactttctaaggcctgtgctctaacgtactgatgaattatgtgttcattacgtgagtcctgcataaaaaacatctcgatgcctagaaaaattgcttgtgtaatggaaacctttgtcatttattcattttaatataataaccgtcttgtcttgtgggtgagtatgattatcgcacctctgatgagagcaataatgtgggagacagtcgtttttacagagcagagctattgctgtgtttagattatcagaatttttattatggtgctaaaataaaactgataacaggggaaaagtagcagatacacctgtagttcccagggtgtctgaggcagagagccgcagcgaaggtgtggttcggcgacctcgctatcgatctacaaggtattccgtggtgcctcctctgtgcacacagccacacggcagggaggggagggtgccaggtgagggacaccatggcgtcatctgagggtggagcagtcagtgggaacatctagaggcacccccgacgcccctgcttccccatggagcatctgcataagtacttctgggcttcactgagtttggggcgggaaaaggtcaattttcatcaggtatggcccaccaaagggcactgagttcatcaaaaggccagctgcccatctgatccttctccctaatggacgagggctgcctagcccaggtcagactccggccacaacagggcatgccttcctcccgtgatctgtgaacacagtattgccagaggagcaggtcgaagatcccaggtaacccaactgccgtcacctccagcacaggtgtgctggccagggcttccagagaagcagaactggggaatgcaggtgcagggagaaggagattccatttaaggagttagctagggcgaccatggaggctggtaagtcctaagatctgcagccacagttccggtcccaaaactgtctgatggagaattctcttgcttggggaaggctggccttttctttctattcaggcctttgactgattggatgaggcccactcacactgttgagggcagtctgctttacccagagttggccagtttaaatggtgttggtgatggtgatgatgatgatgatagtggcgatggtgttgatggtaatggtggtgatgatggtgttgatggtaatggtgatgatcatggatagtgatgttggtgttgatggtgatgatagtggtgatggcgttggtggtgattacagtgatgatgatggcagtgatgaaggtgaataataatgtgatgatgatgaaggtgatagtgatgatggtggtagaggaagagaaagctgcagccaccttgtcttgagcacttcctatgagtcatctgaattacaaacatctttgttttaatcctgtcaagaattttcatgcagtaggtgtcatacccactttatagatgaggagaccaagaattaagaaggtcaaaacttgtccaaagatacactaaaatgtggcaggatgaggacttgaacccagagctctttgtatcccaaacccatgcttatgattgttgacatggtatcttcaccgtgaatttgtatattttgaacccaactgaattgctaaatctcttggtgtccactgaagtctttggtagcacaagaatatatgtgtgtagaacatttctgttgccagttcatgtacattatttagaaaataacacatgctattctctgctaagtaaattttatgccaaaggatgactctatcaataaatactatgtagtaaaaccatgtagtggggcggctttctttatgtgtaaaaggcatgttttattgagattgaagagacaatgtcttttggataggtaaggaactgttggagaaagcaaagtcactaaggaccattattttgtttgccactgttaaacacgtcagcctattttctttttacattactgttttctaccagatgtctagagcaacaggctccctggaaaacctcctcattgtccaccacagcttgagggtcatggtgcttcgtgcccactttctattggagcatagcctcatcccctcctacactgtcctcagaagccattcccattgtctccattgtcaagtacactgtccttagaagccatccccattgccaccttgtcaactacaggtgtctggtgggtagctggattcatggataactggtatggcttgagatgagtgttggctcttgactcttaaaaagatggataaaaatacaaaaaaaaaaaaaagatgcctccccccaaccccagcgacatgaattaaatggatcaatgatggtggagaggcaggcgagaattaaagcagagagactcctgggaagtgtcattacagggtcacaggtctcacctaaggaggtgaaattcccatccttttttccctatgctgagccgtctgccctgttagaagattctgtgtacgcatatgttcatatttctaatattgacatcattaacttatttggaattaaccagcatgaacacttggtagaaaagtagtcttgataagaaatagtaagccagtaccaaacaagagatccaggtcacatttaatccagttgtagtgatatctagaagaggggggaaatcctttcctgtgaaggccttttcatctgcagccttttatccgcttagtctgtaaaggagacactaagttgtataataataccgggccatgtgccttgtaagaacaggcttaaccctcctcctaagaccacaaagtgaatttaaattttctgagtgttgacagctgaagcatgaggtttcttcaaggatggtgttgaaaagtcagatcgtctttccaaacctcactcctttcctgggaccccacggccactttcgttatcccataacaacagctataactgggtttatggcatgggttgatttttctcactctacatagtttgtaagttggtgatttttttttcctttcatccctccttcattccttcaccccacgactttaaaaactatctttataggccagacacgctggctcatgtctgtaatcccagcaccttaggaggccaaggtgggtggatcagttgaggccaggagttcgagaccagctgggcaaaatggtgaaaccccatctctactaaaaaatacaaaaaattagccccgcatggtggtgtacgcctgtagttccagctgcttaggaagctgaggcacgagaattgcttgaacctgggaggtgtagcaagctaaaatcatgacagtgcactccagcctgggcaacagagtaggactctgtctcaaaaataaacaaaaactataataacaccaaaatagactgatagacctagtctctagctcttgccccaacaccaagctcactcctaagaatgttactgagccctgacgaaggacaaggcactgttctcagtgcctcgtataaagatctcagttaatactcacccaaactttggaaggcgagactgtatttatctctgatttaccagaggggaaactgaggcaaagaggaagttaagtgacttgcccaagattacaaggcagaaaatggaagcagaatttgaactcatctggtctaggcccagagctgtctcccacctgccatgctccaaggcattgctgttacatggtcagctgcctacttgattctcaaacttttcatgtccaaccgaacacctgacttccctccaacaccatctcacactccccatgggcttccccaaagttaatggcagctctgccctcctgctgctctactcaggaccttggagctctgcttgatgcctctcttcgcccacatctcacatccgatttgtctccagattttgtcaactgtaccttccgaacagatctagaataggccgcctctcccactgccacagcgtgctctgaccccagccaccatcctatgttattgccgcagcctcctcacggtcctccctgcttctgcccttgactcttcctgcaagccatgcagcaagcccaaggggtccctctagaatgcacgtcagtagtgtccccttctgctcagaactcccagatggtgtcatcccttctcgtgggggtggaagtcagagtccctgtgaggtctccctgggcctcttgggcataacctactcccatttcctatgaactttctccttgcttgctccacatctgccatcctggcctccttactgccctcggccatgccagctaagctcccggcccagcgcctctgccttcccaagcactcttggtcttttctggctggaatgctcttgcctcaacacccacgtggcttgtctccttactccatccaggcctctgctccagggccaccctgtcagagaaggccttgctgatgcccttatggaaaaccatgtctatgagaacagcaccaccagcccctgtgctaaggagaacatgcaccagcccctgtgctaagctagggcggtgatgggggtgggggtggtttcaagaataacacaggtggagattttatgtaagctggtcagtattccagagaaggaaacattttcagcaaagacctccacaaatgtttgttctcgggtgaattaagtaagtcgctatttcacacctactgcatgcattagggtgtgctgggtccttcgagacccgttgatggcctaggatagcattcactcaccaggctgcccaccttgctcacctggtggcctcatggcctcctacctgtctcctcacctctgctcttggcccatccagtgcagaggttctgcagtccacagagaggtctgaagacaaaaccatgatccgggaccagtaagttaaaaaagcaaggtagaggaaaatgtgcatagctattaccatttaagaagggaaaagtgtgtgtgtgtgtgtgtgtgtgtgtgtgtgtgtgtgtgtgtgtgtgtatgtgtttccttattgtaaaaaaagatacaataaataaaaaatgaacaaatgtggggaaggaagaggccaggatagaggggatagaaatagaagctgaacgtctcagaatagacctcggtggatttgactttgaaagatttttacaaagttatcttttacaatacattaacaaagcaagccctgaaaatcaaaagcaaaagggaatcaacgcgtccgtctatcaagttggtgacattgctacaccggtgggaattattttaattattttaagtgactttaagacgtgataattttacttacatattcctggtgggatatagtccaagaccaaaaagaaaaatcataactactttcagtaaccatgttgtttgggatttattggtattgctattttgagactgttgtttgtgtcctatggaataaagcaaatgaataagtattgaggaccaggattattggtatgggagaaaggagacacagatgtgaaatcaatgatttctactaccttgtagtcctcaatttggttttaggtattaatgtgaactcctgatatatgacaacttttttaaaaaatgtatttcctagctctatccattatagagaaataaaagaccagcccaatagcactgaacacccaagcccctaggctatggcctctaaagaccgtttcctaccaagaggaatcagtgcttcttagagaaaatttaattctaggtaggaaatgtacaagatgagaccaaaacactttgtcacaccagcaggcaaatgaacactcagagacgacagggtcacaccaacaggacacccaggtcaacttgaagatgctcccactggtcaaaatggaacagtttctcagtgtagcaattgcaacagatggaaatagatctagtaggttagattcttcaggattctttacaaataaataaatctcacgggtcacccttgaggaagctaagtaaccaactcattattttgaaaacaggaaaataaagcaaaagaactaagcattttcctgacatttctatatgcccactgcctcaaggtaatatgacgggaagttgcacctcataaagttttccacctgataaatgaggtagaggtgatgaaatatttctattttgtgatctttaatgaaataatgggtctagacaatgatcattagtggctgctaacctcccaaaaaattgataaataaaagagagacagtggcaacgagagagaccaagaaaaagagagaaaacagacattacccgcatctaacgaaagcacccaccacccgccacctgtgaagtatttgcctccccccattacacatgatcctgacctggcctctggatcttaccaccatgtgtaggatacaaaagagagggagacagattaaatctcaccatagggagaagccagcaaaatccagtcctggggaaactgtaggaccaacgatctggtttcctcaacacatgaaccacaagaagatagaaagagagggaggaacctctaaattcaaggggatctaagagcacaatcagctggtggcagtgtgtgccccaccttcggaatcgacttcttgctcagaggtcctgaggggagggtcctgaggaaatggactgcttcccaaggctcttccttccctttgctgatggcctccctgtgggagtcctgcaggcttggctcagctcccagtctctgcacttcacttctgtgtggccttggctcagacactgagcctctctgtgcctctgcttcctcacttataagctaggcatgattattttacctgcctcagcgtatgcttgtaaagataagataagcagtccctaacctttttggcaccagagactggtttcctggaagacaattttcccatggacccagggaaggaggatgcttccgggatgaagctgttccagctcagatcatcaggcattagattctcacaaggagcgtgcagcctccatccacatgcgcaggtcacaacagggtccacactcctgtgagagtctaatgccaccactgacatcatgggaggcggagcactggaggctctggcagtcatgctcgcccggccaccactcacctccagctgtgcggcccagttcctaacaggccacagaccggtaccgggttggggaccctgctttaagcagtcgcttctccttccctggcctcgcccccagcagccaataacgtacttcctgtctctatggatttgcctgtcctgcatactttgtgtcaatggaaggaggtattatgtggggtttgtgtccggcttctttcgctgagcataatgttttcaaggttcagccatgctgcagctcgtatcagaacctagttcctttcagggccaaataacatttcactgtgtgggtggaccacgtttagccactcagcagctgacagacacttggcggttgcactttggggctgttgtcagtgtgctgccgggcacgtctgtgtgcaaggctttctgtggacagatgttgattcttagggtgtctgcccagcagtgggattgctgggtcacgcatgcagcagctctgctcgcctttctggaggccacgagcctgttttccacggcggctctgcgggcctcctgttgaggaagccctggcgagtgggggctcctctgccaagcattaaatacggactcaccactggggacggacttggactccaggagcccccaggaggctccctctgtgccgacgcccgtgggctgcagacgggtgggtgactgtgggacccttgctcagcctccagctttggggctgatggctctgcccccagggagtctgtgcagccctcctccagaccccagtccccttggaccaggggcaaagctcatttccctcatccctcccgcccctagcctgctggggtgggagggacgaggctcctgcccggccggccctggggctgggaggcaggtgtgggaagtgcaggtgggtggtttggtgtgtttggcaagccgacccaaactcccattacatgctatggaaacccttgcaggccccagatctctaaattttttttctgtcccccacagccctaccttcatggggactgccccccaaccccactcccgcagttctacccccatgccccacccccacacccgttcatgtgacccagatccatctccttggagccccccgcccccaggtgaaattgagcatgcctcctgttctcactagacagaggctccgagggagcaggcgagtcctctcttgtcagaggccacatccctgcacctgcgcagcacggcacatcctggggctcagcgtcctgcgtggaacatactcaagtccatccacatcctctgcctcagagacagcaggccctaagcgtgcttccccgggaccctccctgggcttctaccgcctgccacactccacctgtccccctgcatccaggagggcagcacacacctcccggggcctctgccatccggcccagggccaccacctcccaaggccccccaggacctggccagcccaggttgccccgtttctgctgctggtgaggtggggctgggctgacaggaaccccaggagatctgcagcggccccgcctcccaggcctcccccatgctgagcttgcccacctcaacagacgccctagcgtgtgctccggagagacactgaaatgaacttggtcccccttcctcacccattaagttcttcccccgaggccagaatccatcgcaggcaggccctgcagagcggcaggagcgggcggcgctggcttcactccgcggtcatttacttccgcttctgggcgccctttcttgcctctacacatcttgctcttggtcgcacgtgctgagtctcggagctgcaggagcttgccaactgcccacctccgctcctctctcctgatgccctgtttgttgatggtgcaggaacccgctgctgcagttaggaaattgaaatgtcagtcgggagggctcctggagtggggtttgaagctgagctctgaaggcctcgagggcagggaaagggaagaactctgggaaagagggccggggtctcgcccctcctggaggcactggctaccctcaactcttgggggagcttttgtgaatggagtttgcttgaaatcgatcttctcagcctcctcaccagcctcacactggcgttatgtccctggtagaccaggcggccaaagcttccttcctgtggctgccctgaccacatctggcactgggaacatgccctgcacttgaggataaataaaagtgaaatttcaattaaaaggataaatcatggtgatgggtcctcgtggtgaccagcaaagacctggcccacttccaggctgaatttcaactgagaagcagccatttctttgtaaaaagttgtccattttagcgagcagtgaagtctcgagggaagagccccaggcctctgttagcagagcctgtgctcaaatccctgcacctgtagagcctgcaccccctccaggacgggtgagtcccttggccacagccaggcctgacaccccgaatgcgctactccctgaccttccattaataccagcttttcgctagcttctggtcttatgcttcacctgaaccatgcagcaggtccctgtcctcatcaaactttgatgccgaacaaagcaaatgtccggcaggccacagtgcagcctcctccccctcaggaccccaggcccaccctgcacaccctcatgtggtccctccaggctcctgggcggggtggggggacagggatttctccgcaacataccacccctgcagtgggattcccagcgttaaggggagaaggtgtcactggcacgtggtgtgcacaattctgaatcctccagcctctccagcatttgccttcattcccacagaggccgagaggctcatggcttccagaaggctatgagatgtggcacaggcacccgacaggtaggactggctggaagcctcgggcctgggcaggagcggctggagcctgcctgcatccacttcctccttccatctcctttgaccaggagaccaccttgcccactcatcctgcaagttgggtggatgctgctgccaacccaggcctggtagatgtacccattccaacctccagccatggcagctgcttcaaggctggggtaagagccaatgagtgtctgccccaggacatttgacggagctgtctggaaacagccaccttccctactgaggcagggagctggtgggtcagagcaggggcactggggccaggacacctgggttctggatcccagctcaagggcttgtgagctgtgtgatcttgggtgagtgactcaacctccctgtgctgcagtttcctcatctgtaacagggaagggctgcatatgaatggccttgtctgtattaacggcactgccttgggttgtggtgatgagtaagtgagtggatggatgtaatgtgactagtgtactagttcattttcacactgctgtaaagatactatccaagactggatagtttacaaaggaaacaggtttaattgactcacagttccacagggcttgggaagcctcaagaaactgacaatcagggcagaaggcgaaggggaagcaaggaccttcttcacatggaggcaggagagagaagtgcgagcaggggacacgccagacacttatgaaaccatcagatctcgtgagactcactcactctcatgagaactgcatgggggaactgcccccatgatccattcatctcccaccaggtctccctctcaacacctgggtattacaattcaagatgagattcgggtggggacacaaagtctaaccataccacctggggtactgcctggcactgcaaactagttagggaagcatccgttgtcattaccatcatcactggttctacgacctcttatttctgtgcccctgacactgatgctattactagtactgtcaaaattgtaatgtcagcctattgctgttacccctggggctgctaggctgatgggatgtaagcacagaagtgtgaggcagcagaaggggagagagtacctgcgagtctgaggggtgggctgagcaagtgctgagagccccgtcagaatggtcaccctcataatggactgagcacggtactcagcccccatgagtgagtgaacacagtactcagcccgcatgatccagccatgcctgaaacccacaccactccaggataggagccagcacattgcctttttgcttgagccagttacattgggatttctgacgtttccaatggacgagacctaaaagtgccatcatgcagtaaaaacctaaattaaatcattttattcttgtggtctgggacctccaggctggatatacagatatttattgccccttgtcccttgtttcattcaatcatccactctggtttgcagagcactttctgtgtgtctactagtatgcagagctctccgggggagacagcaaacatagtattccggcattattactgattaaattaatgattaaaccaatattcagcccacatttagtgacatagcatagtactcaggcctcattactgacaacacaaaaagcccagatttattcacaaacatcagtattcagccttcatttattgacaaagctcagtattcaacccacattactaagcaagagtactcagccttcattactgactgagcacagtactgagccctcataactgaccaagcacagtactcagcccttataactgactgagcacagtactcagcccccatggtgactgagcacagcactcggccatcagcatcgaattacagacactgcagatcctcagttaccatctttcatatactcttggcaacagctctgcaggctggatttaaaaaatcccatttccagatgaggagataaaaccatttcccaaagtgaagagccagtgaggaggcgccccctcctcttcgtctatgggagcactgcctggaggcacagggtgcaggagtgggagacatccattctggcaggtctccttcctattggcccagcgtgggtcacatgtccttcctagccaatcacagtgcccagggaggtgcactctcattggtccacgtggggtcccatggctgtcctggggccaggtgggatggttcccccacacagtccatgcagagcaagggtgggccggggtgatttccaaagactggcagaagtgggtctcggcaggcaaagccagggctgacggcaacctccttctcgggcctgactccagcctcatggcttccttgctgcccctaaatgccctcctttgctgccccttgccccccctcactcagctgcctctccttctggggcctgtggcctaggatctggggcctggggtctggggtctggcctccatcttttctgctggacactggcccccttgggctcccactacacctgcacctgtgctccagcccaggcagggtctaagctccctgcatcttccagcccggcccccaagggacaggaccctgctcccgtatccccagcagtgtggcacatttacaggggcagacaggtcctgttagaggaaagtagacgctgtgtgacaagaccttccagagacaggtggggacgcgtgcattaaatatcaatgaaggttttctgacgagactcctgacttctcatgttggagccagaaaatgacagggactaatcaggggatggcatgggcgacacctctgagggcgaacacgctgcgctacaggttgacacttggcgctgcctatccccgcagcctcacgggctgaaacaacaaagaacccgtctcggctttggacttggctttagctgtgtggctctctgataggcaggattattcctagcccgagtcagaagcagaagctgcctccactctggcttctgtgcagtgacagctcttgttagccatcaagttcaaggagctccttggacgcctcacatctgccccagacagttttcagagagtctctcactcttctgagcagctgtccagacaccgctggaggctggtgctgtgtcgtcacagaccggcttcctaagcttacagtccagtgggcgagacagaaagaatgcaggcaacaaaataagaatacagagttcattttttgtcttgttttgttttgttttagagagatgtgggctcactgtgctgcccaggctggtcttgaactcctggcctcaagtgatcctcccgcctcagccccctgagcatctgggtctacaggcatgtgccaccatgtccaactaagttgttgttgttttttatttgttttttattttctttaaagacagggtatgttgcccaggctggtcttgaactcctggcctcaagcagtcttcctgcctcagcctcctaaagtgcagggattacaggtatgagccaccgtgctggccagtgttcttaataataaaaaaaatagctggccatgacaagggctaggatgacaattccactgggtgtggtaggcactgctagtgtagccaggtcccctgggagccagccacccagcccctgccatcatgaggtcggcttctttgctaatgattcacagctggacacctcccagaagacggagtggggctgggaggtgcctgggaggagggtcggcccacagaggcagcctcctggcctcaaggctcagttcatacaccagggcttcccgtggggtgaggctgaaatgacccaggctgagacatcactcgtccctcccgctggttctaggggctctccctagtcaataacttgtacgagaatccctgtcttgggctctgtttatagggaccccaacctaagacacagggatccagaggtccaggtgggcctctctgtggctgaggcccagccctgagcgccacagtcaggtcgccctctggtcagctctgtcctgccgggcactgtgttaagggctccccagacagcaccaggtcaggcaaaggcttcagcttgctgcacctgcaaactccgactgtcccgagcggaaggaccctgccagaaggaccctgactacccacaggctggaggggaaggccggccggttgggtgatcccagggctctgggtcttgaccgggctctggcattgcaaggaagggctccatctgtgtttccacactggactcattcttgactccaggtccacattggtgagagaagctgattgacccagcttagctcctgggcctgcccatcggctacggggagggtgaggcacgtcggttgtattcccaggaccacttaccatgggagaacaatgacgcccccggagtgaactggcctttgtttccagaagagccgggagagtctcctgcaatcccatgccaaaaattcaggaggtgcctctctctgttaatttggtgcacactgaagggcatttttgagaaggagctaattcactattccccaccgggcagatctgtgagaacatattcatgccttttattagcattcatatgactttgaggggctttttgtcattgctaaaactcaaagtatgtgtgaacagttctgtatgatggtgtcaatgttacacaacaaatgacttctcacttcacatcccgggcttttctgctcattacaagaacctaattgaaagtaattgaaggctgaatttcatcatgcatgaaaagtatttcggaaaatgcaagaaatacaaacatcttcaaacctcttaagtaatgttcaagaatcaaggaagagttggggggaaaacaagtgagaacccttacttggccccacatttgtccaattaattttatgagaacaggtttcacgtcgccgaatcttgctggttatccagtaccatggcaagggctttggaattacactttgcatcaacctggaagaatctcacgctggacggggttacaattttataatcactttccattgaagtaaagttctagtccaggaccttggagagagacttttaaaagtgggggtagggggtctggcacactggcccatgcctataatcccagcactttgggaggctgaggcaggaaggtcacatgaggccaagagtttgagaccagactggccaacatagtgaaaccctatctctacaacaaatttaaaaattggccaggtgtggtggtccacactctggtcccaggtactcaggagactgaggtgggaggatcacttcagcccaggagttgaaggctgtcgtgagttgtgattgcgccactgcactccagcctgggcgacagagcaagaccctgtctcaaaaaaaacggggtttcacttagcacttgcatcccccaaagctgcatttgtagagctggtgggagtgagagaaggggccaggatgttcgtctcctgtggagcatccaggggcgctgagaagacactcagaccctgtggatggcagggagggaactcttctgaccccttccagctttcagaggctacttaggccagcagtatgatgcggaaacaggagctgggaactctgcccgggtcatcacttactcgtgaaccttcgtcacatccctcagcttctctgggcctcagtccctccatcttcagaatgggctctgtgagatggtcaggtggggctgacgctctgagatttttttcaatggtcccttaaggaattccaggcgtggagggtagaggtttctgggtctcctcttctgtgcctgcttcagggtgaatgaggaggcttctgaggctgtggtgaggacacacaaggctgggaactgtgattcccagggacagacacagtgagaagcaggctgaggaccagccttgggaagcccccagcgacgccgttgtgaggggagaacagagcaccccccccgtgggtctgtccctccacaatccgccccagcctccaggagccttccttctcctcctcctcctcatgctctggaacccatgtatcatccaggccagcccactgcaggttgctgggtcggccacatctcccttcctcccctcccatctcccttccctgtggcctcccttcctgtttattttccctcgtgcagaggctcccacattctctctgatcgctccccaagccctcacctccatccccacctttctctgcctgctcaccgttttttcctctgggtctcggggtggccttttctgctccaggaggcctccttagggccaggacagccttgggtttccctacgcagctgggtgactggggccgtctacctgcctgtctgcctgtctgcctgtctgcctgtctcccctgccccttgggctgccttcctcatttcacttgtttgtccaggaacggttgggccctacctaccaacaggccatccctggggactggcagccccgtgtgtgttcccagggcctagagaagggtgtggaggggaaggcaggaggtggggaggtagggagccctcggctgtgcaatgcaggcaggggaacagacagaaaccctgagaaaactctgatgttgttggcaagaaaaccaagaagctcaagcaggagcactggttggggccacggagaagctgcaggtgcaaatgggcaagttgccttcttccctcaaggctcccatgagactcagatcctaaaagaaaattgcctctctcggccaggcacggtggctcacacctgtaatcccagcactttgggaggctgaggtgggcagatcacctgaggttgagaagttcaagacgggcaacatggtgaaaccccgtctctcctaaaagtacaaaaattagctgggtgtggtggggggagcgcctgtagtcccaactatcctagtcccaactacttgggaggttgaggcaggagaatcacttgaacccaggaagtggaggttgcagtgaaccaagatcacaccactgcactccagcctgggtgacagagcaagaccctgtctaaaaaaaaaaaaaaaagaaagaaagaaaaggaaaaggaaaaaaaaaagaaaagaaaattgcctgtctcagcaggccaagtgcaagtccgcctgcctgggtcctgtgccttcgggatggggcaagacggccatggcacctgttggcaccatccagagcttttactccatggagagaggggaactgctccaggcagctcagaactcccaacaggctgcaaaggcaagggtctgcgatctgttttcctgggaacatctctgggcttaatatcatagaaggagaaagctgaaacacctcgctgaagaattacatccttctggaagaacttgatccaggagatttttaaagtgtctttaaaatgctgggacaggaaccaagggaggcttgatgagtggcaggcaaggcccatgaatgcagaatggccgcccctttccattctgaaaggatatcccgccgggtgtgcatgggggagtgtgtgtgtgtattgtgttctgtgtgtgtgtgttcgtgcgtatgcatattttgtgtttgtgtatgtttgtgtattgaatgtgtgttgtgtgtgtatgtgtatttgtgttgtgtgcatgtgtgcgtgtgtgtgtgatgtgtgtgtttgtgtattgagtatgtgttgtgtgtgcactgtgcatgtgtatgtgtgtttgtgtatatgtgtgtatttagtgtgtgttgtgtgtatgtgtgtttgtgtatgtgtattgtgtgtgttgtgtgtgcatatgtgcatgtgtgtgtgacgtgtgtatgtgtattgagtgtatgttgtgtgtttgtgtactgtgtgcatgtttgtgtttgtgtcgtgtacatgtttgtgtatgtgtatggtgtctgtgtgtattgtgtatttgtgtgtttgtttatgcgtttgtgtattgagtgtgtgtgttgtgtgtacatgtatgtttgtgtgttgtatatgtgttgtgtgtgtacatgtatgtgtgctgtgtgtgtattgagtgcacatgtgtgttgtgtgtctgtgtgtaggtatgcgtatgtgtatgtgtgtttgtgtattgtgtgcttgtgtggtgtgtgtgtatgtgtgtactgtgtgtgtgtgtgtgtcatgtgtacatgtctgtatgtgcatttgtgtgcatggtgtgtgtgtgtgtccagagctgtgtgaggcagtggtcaggaccaaactgactcactctgaccctgactttctccaaggccttccttgcccagtgccccaaggggtctcccagaccttgctctaccccgcaatgcttatcctgatgtacaacaacaacttaagggggtgtcactcgtgggagaagccctaattctgagagtgtctgtgtccgtctgcgggctgactgagagagaccttcccgaccgtgcacgtgcactgggacagctctggctgacaggaggccctggtgcaggggccttcccggtgggtgggtctctccctcccccagaatctgggtgtaactctctctccccggcttccacccttgaaagcttagggaatccacctccaaagtgtctgcgattcaaaaccacacagggtgacttttctccagtttcaagttcatttgaaacctggcaaatcctcctgggggagactctgccagaacgtttcatgtcatccagccatttctgagaggagaaccggccttccaagcagaagtccctgggtgaacactatcgcggagtcccgtaagttattttaatgtagacatcactttaaactaacctttcaccatctgttctgtcctctaataacaaatgcggaagagcgtgggtctccacggcatcctaaggcgatcggcgcactggaggcgcctgtctgtgctccctattcacggcccatcgtgggcttctgcggtgtttgtctcatttgccagacacaaatcaagtggaaaactgttctcccctgatctggtggattcactcgcacagtatttcttcttaatatggtaaactgtgggagaattcagagcattttgagagctgatgctcagagcccgtggatgcacatcacccgcagccacccgctgcccgccatatttcagaggcggccaaacgggcctggagaataagcaaatgcggcctgatggccaaaacgtaatgagctttccttgaaaaacaaattctctttaaataggtggtggattattttcagcagtctcctcattaaatttccctatgaaagagggattgattcgcccaaaactagcaatagcgcacagtgaatctacaacccatccttccggctgctgcagaccccgtccctggcgcccacctcctgcctccagaagactggacctggctctgtgtgttctcctcagcccagtgccactcagccactcgagcacctactgcgtgctcccagtgcccttctcctaacccaaagccaaagcagcgtccatactcatcaggcctcggagaagcgcagcgctcccggacggcggggctggtgggctctgtactccacctcagctgcctgctctcctgcgaatgtgatctcttagcttttctcccacccccgaggaacaagtcatcagaggtgacagggagaggggctcctcccctctatctagacgttgccccataccccctcgtgaccaaacttggtgaaaactctccatgggtggagaagagatgggccttgcccatggaaggcctgcaggaataacgttgctggtggccttgggcagtagagggaggggtgattaaggctccgttggaggcttttcccatggaccgctgaggggcccagacccgcccttccctaggtcgctgtctctgaagttctgcttggtgtgtgcggctcagggcagagctgggaaaggaacctacctgatcatgggaaagtaaggaggtgcattgcgggggggaacaaagacgctcctcacagactgtgagtgtgtgcacatgtgcacaggagtgtgtgtgtgtgcgcgcgtgcgcgcaccgtgggcctgcaggcctcctctcctggcgatgtctcctagcacgtgagcagccccctattggcactgacccccatggcgcctttatgatggaaacagcatctccctcttcctatacggaaaacagcttttttctattacgacatgagacagccttggggtggccggtgtgcggggcacctcactcctgcacgtaggaacagctctggtgtgcaaatgcgaaatgctggcttaagaaagatgttctccatcaggctgaattctctatgaattggagtttttccaggggatgacttgctttctttgatacgaattaagctggaagggatactctatcaaacgtgctttgagtctctctgaaggctagcctatgattgtcatcgtgctgcagagatgaggtgcctggcgagaagccagccctctgtctctgaggtaagtgctattcaggcgcgatgaaggaggcttggaagtcactgctgcttctgctggctggcatctctgctgggtgtcacacctatgccacacgtggggcagttgcagtggtcatactgtgtgtcatcagaattcagaatgctcctgcatttcaaggtctgcaagcttcataaaaaccgagtgggctgctttttctgtctcgttctttgctctggaaaagtttcaggaaattccagagcgagctgacctgtcctcagatcttttagaaggaatttcctgaagtcatacggtatctccaggtgtgtgttctctgctagtcaagttttaaattgtatattttctcaaaaaataatcaatttcatacaattttcacctatgcttgcataacatatagagaagaaaacgctttaaaacaaatcttatttttttctcaagtttatcaaagacacagctagtttcctgaggacttttcccctaactacagctctggaatctgttacccctatttttctgctttcagatttggaagtttctgtgtcatctttattgatgactttggtgtctgctgcttcctgctttcttgttcctttccttgtgggattgagcgtttggtttgttggctgtaattccattttgattatgaaaacattcaaggttatgggtttgcaggcactctacctctgggcttcactgtataacagtcgcgttgttatattattattaaacaaaagaaatatttttaaaagcctctaaaaataactttggttcctgttgacccaatggttatttcgcagtgtcattcagatttctaaaaggtcttttttcagttttgttattaacttttaattgtatcatttcagtaaaaggtcctagtaaggccgaatgcggtagttcacacctgtaatcccagtgctttgggaggccaaggtgggaggatcgcttaaagccagaagttcggccaggcgcggtggctcacgcctgtaatcccagcactttgggaggccgaggcgggtgaatcatgaggtcaggagatcgagaccatcctggctaacaaggtgaaaccccgtctctactaaaaatacaaaaaattagccgggcgcggtggcgggcgcctgtagtcccagctactcaggaggctgaggcaggagaatggcgtgaacccaggaagcggagcttgcagtgagccgagattgcaccactgcagtccgcagtccggcctgggcgacagagcgagactccgtctcaaaaaaaaaaaaaaaaaaaaaagccagaagttcgagaccagcctgggaaacatagtgagaccttttctgcacaaaagaatttcagaaattagccaggcgtggttgccagcacctgtagtcccagctactccggggctgaggtagaaggattgcttgagcacaggaggtcaaggctgcagtgagatatgattgccctactgcactccaggtgacagaatgagacctgtctctaaaaaaaaaaaaaaaaaaaattcctgttccattttgttttgggggtatttttggggtttccgctatggcccactgtattatgaaatgttgtgatggtcctgtgggctttgagaaaaaaagtagtatatgctaaagacatgctcaaagttgaatgcaaatccattcattccaccttctcagtttcacctttcaaatctccgtggcctcccccaacttccctgagggaacccccaggctctgggaagcgccactcacctgtggtgggctggtgaccaccaagtccccctcctcattacaggaggtttcgcctcaactgagtgaaagacgtgcatcttgtttttaatgctaccagtgtcctttctgtttcccaaaatcttgtatgaatctcaatctttgctcaaaaaccaaatgaagcctttgcctaacccttccccatcccaagtaaaactcagagtttcgtgtctgcctgtgtctttccatttcctcccccagttagcagccttttctagcttactttggacttgggacccggataaccatcattcaattgttttctaaacaattagaaaggctgggacacacatgcattgggtcctagtcttttctctcactgtggaggttgctctgttttcttgcctttgtctagtcctgggtttgatgtcagaacacgaggccattttataccatcatttccattgttttcatctgtgctgtggatgtctgccaggcatcccgagttctcggtgtatttgctgagttactgacaggccctagacctgcagtcggcggctctcagtgaaaccctgaccaccgactgtccttccacttcccaaagtggatgaaagatcagctgtggtccccattgtacctgaaaatggtcgagctcgaggaactcatgagaggggatgaatgtcagagatcggccccgggcctctcctcaccacaggataacctcttctcgctttgctcctgcctttcagatccggtccgacaaagacaatgacatccccatccggtacagcatcacgggagtgggcgccgaccagccccccatggaggtcttcagcattgactccatgtccggccggatgtacgtcacaaggcccatggaccgggaggagcacgcctcttaccacgtgagtgtccacacccggctgagaatggggccctggggtggcgatcccagccctaccaggccttggcaggtgcccccagcagggccatgcctgccctaactctacaggcagcactccaactttggcctggagcagaatcctgggaagctggggaaagcccaggtcgctgggcactgtcccccgtctaattcagcagggtgggcccagggtgggcctgggaaactgcatttcacacactccccaggacgcaagtcaggcctgggcccacactgggagaactactggtccagaaggcctccatccacgtggtcttctgctttggatggctctgcggggctgggagtcagggtcaccagctgcgatgctccctcggggcccctcatgctgctcttggcccctttctccgaagcacagcccattgtccctcacaccctctctaggctgggacaatagtcctgcaagcttttcatttcctccgacgtctctcgcggcagaaagagcctctgaaaggagagccgcgctgattccctgtcaggggctgtgcacggaaagaaatgctagagagacgtggggctgcggcctcagcttccagggggcgggccttctcctcccgggccgaactgaccctggccgagaggagggggcctgggccatggtgaaagcagtggggagtgcacatcccttcacctcagggtccagagctgtccatcacgtgtaggtgaaggcctcgccagcagcgcagaacaggctggagccaaatcacgagggtcacaccccgacctgcccctggccagatgtgagctattgggcagatgctgtcgcctctcctggcctcagtccctgctcctcctcatggggttgttctgaggactccagggttaaccctggtgaggcgttcagcacaagcccgtgctgtcagggccgtgtgcttctccgtggtaactcgggaacaaccatggaagacttggccccacctgacagtgtcaccttgctcggttccaccttcgcttggcttcagtcagtggcaccgaacagggcccgaccctgcagcttctcacgtctgtgactatttgttttggggttcattcattccatctcgcaccagaaggaggctgcataggggcagggaaccctccggcttttccacgccagatctcaggcccaagtacagagcctggccttcagggggctcactaagcattcaaggaagggagggcgttgacgggagaagatcggttttgctgttggccacagtggcctccctgacagcccctgaggcaccgtctgaagcagggtcggagctggatggatcctggggagcccacttgggaggtggctgccctaaccccggtctgcaccggggccttatcagtccctcacggctgcctcctgggaaggctcacgccttggctgggtgttggggagacctgattgacagtgcctgggcttcgtgtgctgggccccccaggagtggccgaggcagaaccacagaaccaaccagagactccggctgacgccccctggctatgcagcaagagacaggccctcagcatggctgctggctcccaaaacgggctttgggctgccgtcaacacgcgtctacaacaggctcaggaaccggaactcaacagcccttactgccaagaaatagctacggaccaaggacttagggagagacacagacacacacacacacacagagatagagatacagagacagagagggagacagagacacagagagagacataggagacagagaagagagacacaggtaatacagagacagaggcatagagacagaaataaagagagagactgaccgtgagaaacagattcagagacagagacttgatacaagtcttgccacatctagatgtggggcagggggagccaacccttcaactctgtgaattcctgacacgtgtttctgtctgttgtttttttaaccaaggcagacttggagcggggtcagcccacttcttcctggtgtggcattgcacatgcagcctgtgggtgctcgctggggcatccaaggggcaccaggagagctgggtcagcccacttctccctggtgtggcatcgcagatgcagcctgtgggtgctggccggggcatctgaggggcaccagaagtgctgtagggctgccgggtgcctgttgcaggaggactcaggacccagcacttgctgaatgcacagtgattcccaggtgacctgcaccagcagaaggcctcttccttccatttcatcttataattcctcctggaaacctggagctcagagctggccctccctgcatcatccccaatgagctgtttctcctccatggattctcaccagaggcagccttcgcattcccaccaactccccggaaaaggtttcagggctcagctacctctgcacacagcacggctaggggacggggacctccagggccaccactggacagtgcccccttcatgcaccttgaagcctaaggcacagcctgcaacccagcctgggagttctgcccacagcaggggtccggctgtgcagggctagaggttggaatggccactccagggatctgggtcacccacccctctatgattcattcccaaggccctcctctcatgcacaggtagaaattttcaacccaccatgtgcagagacagtggctggcactggggaggaatccagcgcccccaccacctcctgccatgccgtgcaaacatgccgtgtaaacatgcggtgtaaacacgctgtgtaaacatgtgcaaacacgctgtgttagccctttcatattgctataaagaaatacctgaggctgcgtaatatagagagaaaagaggtttatttggctcacggttctgcaggctgtacaggaagtatagcgccggcatctccttctggggaggcctcaggaagcttccactcatgggagaaagtgaaggggagcagacgtcccacgtggcaggagtgagagagagagagagagggacggaggtgccaagctctttaaacaacaggccctggagtgcactcagagcaagaattcacgtgttaccacaagggcagcactgagccattgacaagtgatccacccccatgatccaaacacctcccaccaggcccacctccaacactggagggcacatttcaaatgagatctagaagggacggaacatccaaaccacgccacacacctccattcgtctgtttattctttctgcctaatgcatatgcagagctttgctcagcaccaggctctacccaggaaaggtgcagtgcctctgtagatggtcctgcagcaaacccccagaaagatggggatcacaggctggtggggaccagggacctgggtcccacacctgcaggccccagccctcaccacggatgcactcaggcctcccacactccccacctgagctggccatgaaagaagatgagggagcccagggcggtgggggtggggctgctggtgaaaggtcaggcccacctgccccagccacccacgtggcttgccagtgcgcagacacttttgcacacacgttgccttcccttcttttgtttttcttttgttttttgagacagggtctcgctctgtcactcaggctggaatgcagtggtgcaatctcagcttactgtagcctcaacctcccaggctcaagcaatcctcccacctcagcctcccaagtacctaggactttttttattgtattgtattgtattgtattttttgagacagagtctgacttcgtcagccaggctggagtgcagtggtactatctcggctcactgcaacctccgcctcacaggttcaagcgattctcctgcctcagcctcccaggtagctggaactacaggcacccgccaccacgcccagctaatttttctgaatttttaatagagacagggttttaccatgttggccaggctggtctcaaactcctgagctcaagccatctgcctgcgtcagcctcccaaagtgctgggattacaggtgtaaaccactgcaccgagcccacgttcctgtctatttcctgccccagccctgaggcttcatggttttctccctgctttgaagatgagaaatgcagtcatcccacatcgccagcatctcttgctgcctcctgcacaccaggttctaggagcaagctcgtggagatcattagttttatcatcctcatttcccattttcacagtgaggaatggtgagccctgagatctggctggactccagccttctcaccccttcagggactgcagagtcagcaggagatgcagggcccagaagggagaagaagctgcatcgtctgccaaattctggaatgaagccctcaagttccacttgtagctaatctctctgtcccaccgagatggaggccttggggatgcctggctttcctgcccttccctggagaaggaagcccctccctgcaagcatcacactcctcatcagactccagtgtgaccccaactccggatttccaccttgtaggatgcccaccagggtctttgggggcagctgtgccagccagcaggggtgtgttagttctctgcactgtgtaacgaatcagcacaaacttagtggctgaaacaacgccctatgagttcaccgtgctgtaggtcagaagtccagatgggcttggcttgtgtttctgctccgggtctcaccaggccaaaatcaaagtgccggccagcctgggtgctcccccggccctagggaggatctgcctctaggctcaccggcctgggtgctcccccggccctagggaggacctgcctctaggctcactggggctgtggcaggtctggatccttgtggttgcaggactgaggtctccatgtccttgctggctattcggggggccacagccaccccctgaagggcacctgcatgcctcggcacgtgtctcctccactgtcacccagcaaggtgcataggatgcccgcatgcccttctctcctgcctccagctggagaacgttcagctttcgaaggcccatgtggttggatggcgtccacccagccctgtcttaaggtcaaaaacgtagcccagtggggagggaacacatctgtcttcacatctgggaccagcacctgacatccttggggccatcttagagtttttcctacctccccagtgtctttagatcctgttccattttccacccagctctgtgggctgagggtggcgaggacgcatccccagcctgagtacgctgacgactgtgacacgtgtcaccctaaagccagcctgtaaacattcaaacgcacaacacgcacaagtgctcactgctggctttgcagggtgatgctccagaagattccttgaaggattccgtaagttagacacattagctcacccagccacacgctgtcatcttccgaaagttttctaacctttctgagcctcagtttcctcatctgtaaaatagggaccaagacaatgccaatctcacagattctgatgaaaattggagttaacgtgtgtagggttcttatagcactgcctggccctgagcaaacgcacggtgcgtgttggctgccgatgtcactgatgaagaaagtctccaacacctttacccctcggccacttccaagaccctcatggactgttcccagttccatacgccttggagggaacccacacccacaattaagataggaggaaaagagagcagccaagaggcgggagcattagatcccacacacatctggacagtcatctgtcaacagacacatttcccccgagcgccttcccgccccaatgccagaccacgcccatgtattaatatttcctaatcttgtctcccggaacgaggatagaaaaatgtcctattcaagatgttgcaggaaatgcactctgcgcctgacgctccgatttgcaggttgcagaacgctcggaggactcctccacccatgtttgcgtgtttcctccaccgtcatggtgaggtcacctctctcaggcccaccctgggtgtgcccagcctgagagatgggcaggggagatttctacaggagctgtcaaatgtatttgaatcttttgggggtgaggcagggagtgggacaaggaggacacaggccacgggcagaggcggtatttcctcgttatccgcactcgcgctgctcccgctgctacagatagcgcctgaaactgctttagttaggagataataactttaattttagctcagaattacttttcccccgaggccctgtgacctctgggcgtgtgggaaacacatccatagcaggacggagctgcagatgggtcggggatgggggagtctgcccgcgacggggcggggacagccggttccagcaaccccacagcacttcaggctgtttaaacatgatatgtaaagctgacctggcgtgcgtgcagccacatctcgcgtggcagtctgcagttcctccaggagtcagtgctagcttgtctccttactacagcacagattgcctctttgggtaaagccagcctctagatcttccgtaaacacacaatgtagggggtaaaattccactctggatggttggagccaaaccaaaacactggtataggcatggacacagttagctcctgggtttccctggggcaggcgtggaattcagggcccccctgatcccctgagttcgggggagtggcagcggccatgtgaggcaggccaccaaggggatgatgtggagacccgtctggcatggggcttctctcacggccaccctgggctgggtgatgttttgctgcaaataccttgagtgaggtctgttgtgtccaacttcgagggtgatgtggagttttggcagaaagatgtgagctgaggacacctctggctgaccatccagctctgggtggagaggcctcggatgtgccctttccactccccgacagcccctcagcagccccctcgcctgccggcagcgcccagcctctctgtgtcctctgccttggcctgttcttgaggtctcagctcaagcagcccctcctccgagaggcctccctggcggccaccacacccactgatggcttcttctcttcccggtgtccattgtcccttggatggaagctccagggcagccacactgccttcagtgcacagtaatctagggtccagcccagcacctgccattgcaggcccttgatgggcatctgcagaacaaatgaatgagtgaaagaacaaatccagaacttaaggggtgactctgagaagctcctgcggaaccttccagcccagattcagctcttcccttttcacctcgaagatggttcctgtgacgttcccaggagctccacacaggcctcccggccctgcctctccacggatccccccaccccaccacccatattcccctgctgtgcccaagagctgacagggcacacagacgcagaggagcctggaacttgtccaggctggactctcagtggacgcccaaatgggcccaattcccagcccagctctggcccttgcacaccccgacctgtctcctccccatctcccctggggactaaccttacagtggcaggagttaagcccccgcccaattaggcacaaatgtcttttctgttgccactttgggtggacatcaccccatccaaggggcacctgtcctgctccagacatctgatcagaacagtcggtggctcacggaacagtcgggcaggcatgggaggtcctgggtgggcctgggcctgaccatggggtgttggggggttatgctggcttccagctctgtgcgtcgccccactctgcactctcctgacccccgtttctgcagaggagagagctgaggctcagagaattccatgacgtgtccaaagccccccggcccctatagccaacctgcttctgccatcagtctcctaccccagcaccgcgggtcccaggccgctctcagctgagtgggggtgcccacccgccactgggccctgtctctgctgcttttccagctccgagcccacgctgtggacatgaatggcaacaaggtggagaaccccatcgacctgtacatctacgtcatcgacatgaatgacaaccgccctgagttcatcaaccaggtctacaacggctccgtggacgagggctccaagccaggtgaggcctttagcgtttgcttgctggagaccctgtgggctctgcgggtgcagcacaggccctgagggcaggggagggctgcttagtccccgctaccaggatggtgccacgggacttgggcgcagacacacagcatgcagcagacgtccaccaaagcccctgctctcacaggccttggggtcaagggggttgcagaccacaggtgagaagcgattgcagccacagcagggccaacgggctgggaagaaaacccgggcactgggagtcctggggacagcggtgggcctgggcaggcccctctgtgcagctggcgtgtgggctgggagctgaagcctgaggtggagcagctcccggagtgggactggggtgggctcccgggcaggcggagaggctaggggagcaaggtgcccatgccagggcctggggaggcaacgaagtcagagggctgaggccactggaggcctcccagctaaacgtaagatttggttccaagcaaaacgggaagcgagagaggcccggactccccccacagaggcgatcccatgtgactgaggctgtctgctcccctcagagctgacccaagagcctgtcccccgagacttcactctggcaccggtggtggcgcctgctttttcatgtgtggggccctagctgagcgtgtcatgtcttgcatctctgccgtctgtgactgccaagaagtggacgacccccaccagcagtgaggaggctcaggccggggaggtgaagcagttgcagaccctcagggcgcacatgggttagaacctgggtgtccacatccccacagggctggcacagcccccacctgctcatccagatgctgcaggtggcctggggctgtgggttaacaaaccccagggggcttctgtgtgaggggagcagctccccactgtggctgcctcctgcatggggggtggagaggggtcctctttgggacaaacctttgcccggcttgggttgggtcgggggaggtgaggtcactgaggagacctctgcttgggccacccctaaagtacaagacaccaagtaaatgtgaagttcagagagtcagcaaagcactttaaagtgtggcctaagcaccatttaggacggacttacactaagagagtaatccttgctgatctgaacttcgagtttaatggggtgtcctgtattttcaccagcaaccacacccctggccagtgcccagcaagtgacggcttccaggctttacagaagttggcagtcctgggcaaatgggaggctgtttctgcattgaaatctgcagcacatggagcccagagccagggccagctcccaggggcaccacacgcccctgcaggcccccagagaggggtcagcagcatcccagctctgggactggaaggcaggcctttatcacacctgctcgtggaggtggctgcgtgggcggtccctgggctatagtgtgaacaaggtgaattataccctcggtccgcccccagggctgcagtgtgaacagggtgaattgcactcttggcctgccccagggctgcagtgtgaacaggatgaattgtgcctttggcccacccccagggctgcagtgtgaacagggtgaattgtgcccttggtccacccccaggggtgcagtgtgaacagggtgaattgtgcctttggcccacccccagggctgcagtgtgaacagggtgaattgtgcccttggtccgcccccagggctgcagtgtgaacagggtgaattgcacctttggtccacccccagggctgcagtgtgaacagggtgaattgtgcctttggcccacccccagggctgcagtgtgaacagggtgaattgtgcccttggtccgtccccagggctgtagtgtgaacagggtgaattgtgcccttggtccacccccagggctgcagtgtgaacagggtgaattgcgcccttggtccacccccagggctgcagtgtgaacagggtgaattgtgcccttagcctgccccagggctgtaatgtcaacagggtgaattgcgcctttggcccacccccaggggtgcagtgtgaacagggtgaattgcgcctttggcccacccccaggggtgcagtgtgaacagggtgaattgtgcccttggcccacccccagggctgcagtgtgaacagggtgaattgtgcccttggcccacccccagggctgcagtgtgaacagggtgaattgcgcctttggcccacccccaggggtgcagtgtgaacagggtgaattgtgcccttggcccacccccagggctgcagtgtgaacagggtgaattgtgcccttggcccacccccagggctgcagtgtgaacagggtgaattgcgcctttggtctgcccccagggctgcagcgtgaacagggtgaattgcacccttgattggttgtctttcaggattatgacacacgggtgcatccagtgtcactgaagggaatgaatgtgacattatttcactggaaccatgggcagctggtcctcagccatcccttaaggggcaggcagggggtgagcagattagctccaggcagccaaagaaaacggatgaggacacaggagcccctcgcaagggtgcagatgtggaggagtgggcggcaggccaggcacactcctcacacagataccactggcctctctcccggagacccaggatgctatttaaaggcgcctggattttcctggcctttctatcacaaatcaaacctcccgtgtcttactttttaaaaaatcaatagcaaaagtcttcccaaaagcgcaattggctttgctcattaggataacaaagagcaaattgcggagacgtggccccgtaagtccacgtaagccaagcctggagagcccggctgcccggccatttgcagagctgggcacggcctggcagccagaggacatgttgatgccgggaccccggagtcagcccttcttcccaccattcctgagcttttccaggactatgttgagtgaaacgtccatggactctcagagcccctgggggatcgggagtctgtctctggtcccacaacaagctgtctttgtgcaaaggccaggacggagctggaggtgccactgtcaagcccacctcggtcacccttcacccaccccagacaagggcagggagagatggtgtccatgcaaagtgtggcttgcttctctcagtggcggtcttcccaggacttggaaatcatctctacaatttcttctcttccatcagtaaattacaataatagaagggttctacacagtgcctttgtgggataaggaaaaactaccgccagaaattagtcattattctctggaaggacagggtaatgaagggtttcagatgcgtgttctaatggaaaacaaatggaaagatgggttaaatattgactcagctccagaggaacttcgaaggcttggggagttcatctggggacatgagcatgccagtacaggcccgggatccatgagggtcctgtgtgccccccacactcttctccagccccccgggattcacaagagtcctgcgtgccccccacactcttccccaaccaccctgggatccacgagaatccttcatgcaccccacactcttccccagccccccaggatccacgagggccctgcatgcatcccacactcttccccacctccccccgccgggatccacaagggttctgcgtgcaccccacattcttccccagccccctagaatccatgagggtcctgtgtgtacccccacattcttccccagccccctagaatccacgagggtcctgtgtgcaccccacactcttatccagccctcctgaattcatgaaatcccctggggcactactgacctgccctgctgggctcagagggtgtggcaggcaccgtggccggctcttttgtggttgaggcacagagtgagatgtcttgttagtgagcaggaggcagaccccaccccaggggctccccgagcaaggggaccatgactgggaagtgcaggcagggctggcagtgccaggtgtggcagcgcccctggctgagatgtgtttccagagtctccccggccggttttcaaccccaccctcctttctcctccaagagatcctctctgctgcagccaccatggccttggaggccaaaagcttgttcctaagcagctggacagccctgggggtgaggggagcgtgtctttcccaagagtccccgcaaaagtcccaaggcaggttctcgtgggtctcactgccctgcccctgcccccatacccctccccggggcagagggtgacagcctgtggcacacaaccgggggacaccctccatcttcatgcgttccgcgctgtctgggatggtgggcggcgcgtgtgcgttcgccatggagtaagacggggctccaggaagtgggcgttcccaccgaggccttcggcccgggctgcgtatgtgaccctaaggctggtgagttccgatggtgggagaaggccctgctgggtgacccgcagacccgtaccacagacgttttccacaaagaaatcaacgttggtttatttcaagttccccagaaagtggaaccaaaatcagggttccctccaaaaaaaaacaaggtccacctgaaatgacgggagggccgaggatttttgcccagtttccagcgaggcctgaggcccacggaggtgactaggggccccccatgtggagggagctggggcctggcttcgcagccctcactccgtccacccaagcttcgccactttcgtctgctgcgttgggcttcccgatgggatttcactggaagaaatgacttctcaaaaaatctttttattttgagataattgtagagtcacatgcagttgtaggaaataagacagacagatcctgtaagcccttcagccagcctcccccaagggtgatatcttgcagaaccgcagtgcaggtcacagccaggaaactgaccttcgtaccggccacagcccctactaggatcccacccgtttgacctgcattcattggtgtgtctgtgtgtgtgtgtgtctctgtgtgcatctgtgtgtgtgtcagtgtgtgtctgtctgtgtgtctctgtgtctgtgtgtgtctctgtgtgtctctgtgtctgagtgtgtgtgtctctgtgtgtctctgtgtctgtgtctgcatctgtgtgtgtgtctgtgtctgtgtgtctctgtgtgtgtgtctgtatatgtctctgtgtgtgtctctgtgtctgtgtctctgtttctgtgtgtctgtgtctgggtgtctgcatctgtgtgtgtgtctgtgtctgtgtgtctctgtgtgtctgtgtgtgtctctgtgtgtgtctctgtgtctatatgtgtgtctgtgtctctgtgtctgtgtgtctgtgtctgtgtgtctgcgtctgtgtgtctgtgtctatgtgtgtctgtgtctgtgtgtgtgtctctgtgtctgtatgtgtgtctgtgtctgtctgtgtctgtatctgcgtatgtgtctctctgtgcgtgtctctgtgtctgtatgtgtatctgtgtctctgtgtctgtgtgtctgcgtctgtgtgtgtgtctgtgtctatgtgtgtctctgtgtctgtatctgtgtgtgtctctgtgtctgtgtctctgtgtctgtatgtgtgtgtctgtgtctgtgtatctgtgtctgtgtgtctgcgtctgtgtgtgtgtctgtgtctgcatgtgtgtctgtctgtgtgcctcccatcaaccctaacctgtggcaaccacgactctattttcatctgtagtgttgtcattccaaggatactatagaaatggaatcacagccgtgtgttcccttttgggattggctgttttcctgcagcatcgttctctggatgtacagccaggtcgtatccatagctcgttcctttctgtggcgtagaattccgtggcctgggtgtaccgcggcttatgagccatccccaactgatggacgctgggcagtttcaactctgggccatgatgaactgagctgctctgagcacccattcctgcatggggtctcgtgtgaacataagtttccatttctctagaatgaatgcccgagaatgcaattgtggggtcatctcgggagcaggcgtttgttttgtggggaacttccatgttctctgccagaggggctgccccatcgcacactcatcccgccctcctgagagtcccggattctcggcatcctcaccagcatctgacgttgtcatcactttcaacgttagccattctaagaggtgcatggtggcccctcgtggttttaatgtgttttccctctggcaaatggtgctgagtgtcttttcctgtgtttattggcatctgcgtgtcctcttcaaggaaacgactcttcatggctttcgtccatttcctactacgttattcttttactgttgagttttcggaattctttacgtattctagatacaagtcctttgtcggatatgtggtttgcaaatatttctcccactcagtaacttgtcttccatcctccccccagggtctttgcgagcgaaagtgtttaatttggaggaagtccagtttatccatgcttcctcttacggagcaggcttcagcatcaagtctgagagctcttcatcaagccctaggttctgaaaatgctcttctctgggttttctaacagttgtttaggtttgtagtttacgttaggtccatgattcattttgagttaatttttatataacatgtgagatgtagatccaggtgtattttttgctcatctccatattttccatgactgccccagcgccatacattgaaaggctgtcctccctccggtgaattgctttgacatctttgcaggacatccattgggcacatttgtgtgggtctgttcctaggtttattggtctgtgtgtctcctgccaacactgcaggatgaccgtagcctcacggccagcttcgctgccgggtggagggatggcttcgtggacagtgtgaggtggtcatgccctggccttcacctgtgtccctccaccagggtgggaacatgcacacagcactgcccgtactcagccccctcctcagcaggcaggggttctgccatgctgtccacggcactgccgcgtgaccacagcatggccctggggtggccccaggcaagctccttcccactgcttcacacatcttcagtaaaagaacaaggacagtgcctgcctcatgggcggggaaggtcaggggcaggcgtctatgtggctcccggcagtgacgctgtcattgacagtgtccttattatctgcagctgtaactccttcatattaacagcaacttaataatacattctggctcaaaatatcagttcattttcctgactccaccaaggtaattctgtcaactcaaacctctcttaataaatacaagacaactttgaaaaccacctatgttccagattcctcagagcaccgaggtccacggggtccttgcctggtcaccctgctggtctgcctggcaatccctgtcttccctgagggctgagctacacctcggatatgcatatttgtgaatgatcacaaattccaaatcagccatgtctgaacgatgcagttttctggcctgggatgggccaaccatggccatgcctgaggtctggttcccagacgctggcctgccaggaggacttgggtgcaggtgatttatgaaggacctgcctgctcccaggagatgtctgggagggaggaggaggtgcaggatgccctgacaagcagaaacagcacctcagaagggccccaatgcaaggcaaggttgctgggttctgtgcagggccccagcaggttctcaggaggggaagaggcatcactgaaaatgacagtgaccactgaaggcgtctgtccaggtggcatccaggcccctgcagggttggctacaagccacagctggtttccccctcccgtctagagtaatggcccacaggctgtgtttcccaagggctcctcctgcaggatcctggcatttatatctgcaggaggactctgagacccatggagacctgtgctgagaaacagccacccttgtccccagggcagagaagtacccgggggaccctctggctgtctgcctgcagatcagcatgcagccccccagggtgcctttgggtctaaaaaggtgtgttctattcctttgaactggaccttttgagaagagcaagcaacagatgaaaaatagctgtggccaccaccctgacctgaagctcacgcacccgcacctgcctcagctgtccactctgcctagtcccaagaaccgcactggacgtgggctccgctggtctccaccgacgatccctgcttctctgcacccaggggcagggccagcaatgaggcctagtgaggttccacgtgggaaggacacaccttccgctgaagatgcgatcatgcggtcatcacagaaatgcggccggcggcattcatccactcggccaggtgccaggcaccactcttaagttctccatacaaatcagctcactaaatgccacgacagccccaggaaacggctagttttatttcccccgcatacaacatgaggaagtgaaggcaccgttctgtaacagtaaagacccacagcagctgggagggaaaggcaagacttagaggccaatggatggtctcctgaacgcccctgctaaccactctgcaaaccgcctccccttccccgcctgtgcgttaggaatgcctttggctgaaagtcacagaaaacccaaccacagagaacccaaccacagaaaacccaaccacagcagcttgaacaagtggaggctggggtgagagctcaaggcgtcgggccgaggcctgtgtggtggtcaccccgcttctcagttctcaccacgttgtcacgaggtggctgcggcgcccccaagcgtcacgtacaccatcaggcaggagggaggagggggcaatgtgtagcatgggcagtttcctgtaggaagaagtcccaggtggctgtgttgtcctgtgggtaaggtgggcatcttagctgggtgctgcggagggcaccaggtgggaacgcaggaaccccaccctccagaagcgcactgtcccgttgagaaacccagagatacatccgctcctcaaggtgcaggcctcacacctggggaaaggcagggaagcaaacgtcccaggccactgtgaacgggaagcgcctttccctgtccccgggccctggcaaaggctgtgccctcagcccagggcgctgtcccccacgctctgcgccagctcctttcctcctgcagctcacagccacttctgcacagatgtcttgccctggcctctcccccaggcagccccctccatgccctgggcgactcccttgacacccggagagtcactcaggtggctgttggtctccaccaccgggttccagttctgagcacagagaccccatctcctccttcacccttgccgtggaggctgcagggagagcccagcctcagcctgaccccgggggcagctctcaagccttgatgacacctcagacgtgtcccagcactagctcctggttctcccaaggtggactcattctgcaagatgggcaggagtccatgaggacctccttggcgggggcggtccttgatggacaggtggggtccacacaggtgcagagggaggcagatgtctgccaggcccactgtgaggccaggcgtctcgtccagggcaggagggcagtggacagccagcctgccatccgtactgcctggtcccctggacccctcgctccccatcactgaccagtgactgttttccaccgctgtcccccgcagcatcagagaacgagctctcagggctcgggaactcacccaggctctcagcatttctcaaagtgcccagggaaagacacctccgtattgatgattttttaactaaaaagggctctaatcgggatgtgctacttcctctaacccctcgtaactgtgtggggcctatattataagttttgaaattaatgtcattttaaaatattaaaaagcagggaaatctgcgtgctgcaaatgaagtcaaagagaccttcatctatacagcaccgagtttttgcttaaacagattattctattagtgggccccgtttatttatttattttctttctttgccggcagaagtccccctgaggttaatgcacagatggcactagatacttgaaagtcgtctgaatattaagaatttaaatctctagcctcagtgatttgaacagaaagccaattatggggctgaattagttttcaaattaaactgcaattgaaggcttgtgaaattaatcctttaaggcgcatggcagcgttggtacatgaattccgagaaagagccgagcctggcagcctccgctgtctccccctttacctgttagcacgatccgtaaggaggtgtccagcatctcccacgtgaaagacgaggctgttcctcacctgcagccggggcgggggatgctgtcccaactcgctgcttccttgatggggaaatactcaggtctgtctgctgggggagaaggaggtggaaagaggcctccagagaaagccctagaaagatggtttccttctcattctcaaagcccacggggcaggagaactcacctgggcaccccaggttagcgcagatgccactgggtgaccgttcctcggcagagggcacaggtgagggactgctggccacatctttcctgcagggagcccagtttcaggatttacagcctctgtggaacggagccctgcagggctcgcacttgagcatggcccagatcctgcgtcactggagaagcgagagggccagtggggacacggggatccaggttcccacttcccagacaccagagccagcactgcttacagcacaggaaggaggccagagggacagagcagctctaggtgcagaggaggagccgaggctcccggaggtgaagcgagggtgcagagccatgaggctgggatggctgctctagtgccaagccccacctggcctccaaagtcacccagggccacagaggctcctgcggatggaaagaggcccccgtctcctcccagccttaccagcatgggtttccagacactgcctgcctcagcttcagcttagcccttgggcgggtggactggagccctgccccacaattcacatccatccagcacttcagaatgtgaccttattcaaaaatagttctttgcagacattttgttaagatgaggccagtagggtgggccctgaatccaatgactgttttccttctaacaagaggacaagacacagggcagggcctaagacggtggaggcagaggctggagtgacgtggccacaagcccaggagcacccaagttggacggtgccccaaccccaggagctggaagggccagggcagggctgctggcgttgagccctgtgtgctggtgctgcctcctggcctctggagctgacggggccagttctgttgcttcaagctccccatctgcggtgctttggcacagcagcccaggagaccagtgcagtcccctttggggagaagcctggggaaccccctggtttcgcccacttccctccccatgcagccagaaaccctgtccatcgaacatcctgccacttggagcctgtggggaacgcagcacatgcccccagaaacacaagaaaacacattgctgggagagggctgtgtgacccaagccacagagaccacgtctgctgatcccaggatcctggagcggccactgtggctcagggactccagacacaaggggccgtggatccagtgaggtcagaggcaccgcagctccctctccaggacacactcactcaactcccagagccaagcccttgccagcgcggacggcgcccatgagaggaccgagggggaggtggccccagcttcccgggcagacccttatgagacaaacccgattatctccacccatcattccctcctgaatccactgacaaaccagccctggtgagttcgctggggcctcccagggcaaggccaagtgcagcagttgtcctgttgcccttgacccctggctgtggtcctctctggggctgcacggggccactctcctgccctgtcacccccccgggtcctggctttctctccagtctgctgtgcagcagagcctccagggctctgtgccacacctggggcattttctgcctaaatccacccctgagtggattcgaggcagcctcgtgaacttcaatctgtgtgcgcccagacctcatgccccgacccctgcctggcctctccctgtgctcccacccctgcccctgccccccaacagctctgccaggtacccctcctgccaccctgcatccctcgctgcatccggcaggaggcagtgagctgacttcctggctagttaatgtaggtgatgaactgacttcctggctgattagtgtaggtgatgagctggcttctggggatggttagtgtagatgatggactgacttcttggaatggtttatgcaggtgataactgacttcctggctggttagtgtagataatgggctggcttcctgaatggttagtatagataatggttggcttcctggctgattagtgtagatgataggttgcttcctggctggtttgtgtatgtaatgggttagtttcctgtactggttagtgtagatgatacctggcatcctgggtggttagtgtatgtaatgggttagttcctgggctagttagtgtagattatagctggcttcctggctggttagtgtagatgataggtcgcttcctggctcattagtgtatgtaatgggttaggttcctagactggttagtgtagatgatacctggcttcctggctggttagtgtagatgatagctgtcttcctggctggtttgtgtatgtaatgggttagtttcctggacaggttagtgtagatgatagctggcttcctgactggttagtgtatgtaatgggttagtttcctgagctagttagtgtagatgatagctggcttcctggctggtttgtgtatataatgggttagtttccttggttagtgtagatgatagctggcttcctggctggttagtgtaggtaatggcttagtttcctgggctgcttactgcaggtgtggtcagaattctatttttatatttgatctggtcattgctcgtgtttatattgaacatcttagcagcacctgggatcatacggtaccctgtcaccaccagcatcctggcactgaggtcatcaagggaccgaagtttcctacctggaggaccctcagttgttctgtagtggccacaccaccccctggcatgggggattttgcccagaggaccctcggtgccaccccctggcatgggggattttgtttatgagcttcagcccctggggtatacacaacataggtctcaatgcttggcacagagggatgttcagtaaatatttgttccaggccctactctgctctcagaaacgatgtcagcttggacagccagggttttccacacctgcgattttttccttaggataaactcctagcagtgaatttgctgagtgggcacattttgaagggttttgtgtatgcacagctaaaccgcctctgagaagctgaggcctccccctccccccggaggccatggaaggggccagctgccctctgtgccatcacgattaggtaccatcattattttaaagtagcttttgcacatttgacatgtggaaaatgtcttcctttcatttctttgatcaataataaagttggttttaaaaagaaggagaagcagcagaaagcccatctgtgttaaagatgtacgatccagaccctttggcaagagggctacaccccagcgttccagcaggtgtgttgggtgtgagacggtcagtgccttctcctcattgtgcctttagatgtttcccggtgagcgtgtgctagttatcatgagtgtgttttatttctgcatccagaaaagaattctcaaaagtgtgtcatttggccttaaaaagcagattcctgaacgtagcaaaaagaaaaaagcgtagatgcctagatggagcatgttttcgcagttggccggaaagcagggagcggtccttgttgccagagagtgggatcctgagccacctcccaaagaggggcctcccaaagaggggccctgccgtcgccctttcccgggaaggagatgatgccgacggctgggggtggttcttaagagcagcgtccatcctcagggagcatccagtgaggaaccagcaggagagagacgggtggaggctgccttccaggtgcccacacacacacagctgtttccagaacactcgctctgggcgcatgcatgtttgactctgagcctgggattttgaagccctgctctcccttcctgaaacactgacaccctggctttgccagtccaggcactgtgtcagaagcaggggacctcccctcaaagagcttatgataggccaggcacggtagctcacacctgtaatcccagcactttgggaggccaaggcaggtggatcacctaagctcaggagttcaagaccagcctgaccaacatggagaaaccccatctctactaaaaacacaaaaattagtcgggcatgttggtgcactcctgtgatctcagctacttgggaggctgaggcaggggaatcagttgaacccaggaggtgaaggctgcagtgaacaaagatcatgccactgccctcctgcctgggcgacagagcaagactccatccaaaaaaaaaaaaaagagagagagagagcttatgataaaattgagcccaagtaaagtgggggattcctgggtgctcatcacattttcctcctccccccaggcccctcctcctgtgccctggaggtggccagcagctctaagtgcaggatttgcctcctgaggcaggaggcgagcagaggagggcaccatggcattggtttaaagccattactgtcttgagttaatgaagagctaatgtgataaaagccactgcaagcttctaatgagcagtcctttccacgggggagtgggtgcgtaaactaaggtggcccacgaggcgcgatgcatctgccaaggtgagctgagttccgatgactccggccatctcagaacgtccaggctcttctctgtgaggaagacattctatttctgcaaaaactccaccacatggaaatggggatattgttgcttgcatcagatgtaaggggtgcaattattcgtaaccaaaaagcaggcagagacttggacccctgatcaatatccgattagtgcttggttaatgagcataaaccgcagaatggatcagtccttcaagtcagacatgtggagtttccacgctggaggactctggggtctgggccagggccaccagctcatcccacggtgggggtgcagagggggttcgtccacgccaggaccccttcccagggcgggcatcctggggccgtctgtgttccgtggtacagagacgcgggaatgctgtagatgggagggaattcagtccaagggaaccctctacagctgtaggcctgagcaggacctctgaggagtcagaggggaggcagcctggctggttcctgccgcagaggcccagcttctaatggggcaggggccaacaaggggtgagaggcacagacagcttggtaggtggggacccggacagctccacagtattcagcatcatagacagtagagggaagggccagcatctcaactcccaaacccacaacaggccataaaccctgctgtcatcagccttaaggcaaaccaggcgattatacctccatgctgggcagatgtcccctccacgctggctgagtgtccctccatgctaagcggtgtcctccatgctgggcggatgtcccctccacactggccgggtgtccctccactctgggcaggtgtccccccacactgggcaggtgtcctcctccctggccagctgggtgctttcctcctgtgctggagctgcctctcctcttgtcacctggtttccccaccatgtattccagaggggagggcgggagacggggagctctgagcacacgtggggaagccccatcccagccgggcacacctggcccccactgagccaagcctccagctgtggcacctgcagctcacaggctgtggtggacacacacaaagcctctagacgtggcaaacgtggcaggctgtggtggacacacacaaagcctctagacgtggcaaacgtggcaagtgccttcaaggagctcaacttattgaatgaaggactggcctttattctgagactaagtctttcctatgattttgatggtaaaacattattttcctttcatgaaacatttgagctagatgtatactttaaggtcttcccttggtagaactagaagttggcaaccctatattgattcccctgtatttttaaaaaccaatgttgtccctgaaatccaaaaaaagagcatacagcagaggtcagcaaaccaccggccaaacacagctcagcacctgcttctgtgaatggtttgatgggaacacagccgtgcccattgctggacgcatcctctcaggctgcttctgtgcagctttgaggagttggaacagggaatgtgtgcccgcaaagcctgacatacatactgtccagccctttacagaaagtgtctgctggaccctggaggagagcgtggctgctttcagtctgggtctagcagagctcactggacccagccacgttcctcgtctgtgggattcagtttccccatctgtcaaaaaaggaggtggcccagtcagggtcccaaaggtctgtttccagcctcccgctgacttcccattccacacatcccacctggcccctcctcaatgccaaaccctctcacgtccacatcctggcccgccttttccccaggtccccaagcctccaagggggcttagtcctcctccctacatgaaatcacacagcagcaggccccttccgccgagggactgcttggaggaggcagcttcgattggtgggggaggacctcctgcctggccttcggggaccgaggagtccttcaggagagatcagctggaaatgccactccacattccatcctcagtggggagagctgggccccagtgggcagggagttcccatgatgtcgtgaggttatctgagtcctgtggaggcggaggagggggacctctgtggtgggaggctcccagccgttctgctaatgtgatttctcagtgatatggtggatcagggcaggcactcaaagggagtacgcgggtctctgcctcacagtggatcagtaaccctgaggtgctgggagtcctgggctgactcgctgtccctccacctcccccagccagtagggctgagtggagaagagctccaagcccagatcctggaccccagccctgctccaccgctgtccgatgcgtgactggcccgagttcctgcacgtgggcagcaggccatccgtgagatttctctgagacatgacaaacccatgcacaaaagaccctcgggccagctgggcacagggtggggacccaggaatggcggtaggggctggggcagggtgaggaagaggccaaggccgtcagaagggctccgcatccccatccagcccgagagaccgtcattctcagaaaccaggctggctgtgctgctttcagtgagtacaacagacagtgcccgatcccttcttccctcactggtcagggctttgcttctctccctccaccttctgcatgtccctgccatcatcctgccacccccaccatcaagctactgggcccctttctgcgacaggcatgtggatcctcacaggtttcacagacgaaaatgccgggggccacgggtggaggggaacagtgagtgcttcgggaagctggagtggcttctccctttgactttctgaaccagatgagccaaatgcggtcaccaccgacccccatgactttcccagctctgccctttcgtagagatgggtggtttcaaatagtgcctgatgcgccaacattggcttcacttgctcggggattcctggcttgatgaaggctgaacgttagtaacaccgccctggtcagacccaccatctgctttgcaaatgaaattctgcaggtgtttgttctggtgtttcggtaagcagctttaaaaccctcacgaggcaaagttatttttgtttatacaagtcatattccttagacgcaccagtgtatttatcctttatataaacattacgtatatgtatatttataggatgtgtgtgtgtgtgtgtgtgtgtgtgtacatatcagagagagagacagagacagagctcctcatatctttctgcatttccaaggtgccctctagaatcattttccttctgcctgaaaacacccttagtatttcctctagtgtgggtctccaggtggtaattttttgttttatcatttatcacatttagtgtctatttttcacttttattttagaaagtttttttcactgaataatgaatgccaggctcctcgtgagttccttgtattccattgttttccagcttccatcgttcctgttgagaagtcagcttgaagtcttctcattgccacattgaaagttttgtgctcttttaaaaaggaggctgtgtgtgatgttatccctctccacgaatgatttctttttgctgctaagtaggggacgctaacaatcacagagaacctcagcctaagttactgcagttagctctgcgcgtgtgttaggactgtttcttcccagttcaccctcactcctagggtgctgcacttcagggttttcctcttaggaaaatgcagaggaaagccagcacagagggagggggatgtctctttagaggggagtatggttgggaccaggcttgttgtgctctaaagtggtggggacatcgtgatgggggcaaggatcatcggggtggggtccctagttccagaggctgatggtcgccaggccacggcccctcccacccgtttgcttactgcataaatctgtttgattgaactataattcacgtgccatacagcttgctctttgaagtgctcctgcctccgcttgtttttctgtgttttcatgaaacgtgtctgctttgagaattttgcattcagtagaagctgaaagctgaagcaaactcctagtcagacacacccagggttcccctgcatcccacctgggcttgtcctgcctgggtggaaggccagagtggcggtcttctctgcagggctgcagagggagggcgaggtgggggaggggcgagggggaaggctccctgcctgctctggggtcctggaaataagcagtagcttcgggctcctcgcagaccctgcctcctgagcatgaggccgccccgcaccctgggcttctggcacagtccagcaaatgtccaacagggcatctgtgtgccaggtcacagggacagcatggacccagccccgcccttgtggtggctgtaatcccacagaggacatagacaataagtagacacacagctgtttcaatgcaggtgagatgaggatgcacagggccccatgactcagtccagagggccaggacggggctttggggatgaggaggagttggccaggtggaggagagggaagaacgttccagatgcagaacagattgtgcaagatcccaaggctggtgtggcgagagtccttcatctcatgcacacgggaacgagcacctcgggtctctctgagactgccaccccgcacctggcccgccgcatgaccccagccccgtcagccaggggaggcactgcacaggtagaggttgcaccatccccagggcccagcagggcaccagcagctctcctctgtgcatgaacgctgcagggccgggcacccgagcttccagagttctggggcatctcaggcagccagcagggcaagctgagcacacacgtgtgcagagccagggcaggaacaccggaaggtggcgggcagagtccagccccaggacttccaggtgagagagcccgccgtgccagcatcaggagacagcagtcaggagctcacagagcggggcctccaccgggtacagcgctagcacagagttggtgctcagtaggcagggactaaagcccccacccaccactgctcccagcagagcttggtcctcagacctggagatgtcctgaggccacagggtggggcgtgctgatgcaggccctccccagggcaggaaaggctgcacagccaaagaaaagccaagtgccattctcagaaagtggggaatgtgccagagtgcactatagacctcaaccccaatgtgtgcatggggaaactgaggcaccaagctgagagagcacatgggcagctcaccgagcccctctgaaatgccagcggcccccagtcccagggcgcccccagatgtgctccatctgacggagtcctataggcacagcctccctgctcagagtcccttctaggtttgttttccactgtgtcctctgcagtgtttattatacagcttctgtgtgtccagacctataccaggccctgcttcagtgcctgagtcccttcctttaagcccaaccacactgggctccctgcaggagtggaagcaccttggacgcactgtcggggcctcaggccacccggctccaggcctgctctgctgccccaggctctggaagcttagagaagttcttcctcctccgaggcctggtctttccccagccaaaaaaggaagaggtcagagcagatgacctcaaaggaacctcaagctctagaagaaatccttctatgattctataaggtggggtggaggcggcaggtgcactaacaccacctctgaacacgccgagaggaagggggttccgctacgccagactcacggagagctctgtggtcggggggctctgcccaggtgtgtgcgggggtggcagcctgtgtggcaggccatccccatctgagctgctgtctccgttccaggcacctacgtgatgaccgtcacggccaacgatgctgacgacagcaccacggccaacgggatggtgcggtaccggatcgtgacccagaccccacagagcccgtcccagaatatgttcaccatcaacagcgagactggagatatcgtcacagtggcggctggcctggaccgagaggtgaggcggggtggggtctgcgtgcaggcgggtgagctcctggtccccgcaggacacccacaggaccctcggggagcctctccagtggcgccgtcggggagtgatcgacagtctccccagtggcactctcttgccatgggagagactcagcaaaggaggctctggagcactcagcaccggctgctatgagcgagtccttgtgagatttccagaacaggcccagctggtgcgtgtggctatgggcggaggcctcagaaaagcagggaccacccgctggggtctcggggtctagccgcagctgcactcggggtctggggtgctctgacagcccctctcaggacctgaacacacacgcctgccttgaaacccaccccttctgggcctggcacctccaaggagacccaccccacccaggctgcggcggcctggctgtgacgaagggggcatggagaagcagtgcttttcacacagcctgaaaccatcacagccaaatgaatgggctgctggttggtgctgggttccatgcgctcccacctcctgcactgtcctgcggtcctacgaggcttttgtgacagaggcctccctccaccccttcatctcaagtgcccgccccactcagagacagaccccagagggaggccctgggcggtgggtgaggtcgggggcctgcctctgctctgaagcttgtcaagtgcaggcgcatctccagcactgggctgtgcgttcccagaagattcaccacccgcccctggggctgaaagcgccccaccagcagcaccttgagtccccaggtgcccaggacagggcatcgcctgccttccccatctccaggtctcgctgtctggtctcctgtttgcactgtgcccacagaggccagtgtcattccagacgtaatttaccctctgaggcatttggctcccaggagccggtagagccacctcgctgggctcacagccagtgcagccctgcccgcgggaggcttgtttccagaggccacagcgccactttctggcagctcctcggtcttgctggcctcaacccttctgctccaagttggcggcttctgagtgcgtcacggccctcgagctctgggtgtgcggggaccccactgcaagctggggctgccaacctgtcaccggggcttgctggtgtcgcttttggggccgggactggcaaggaagtggcaggtcctccttccaggtttggggctgtgggaccccccggggcctccagtttctgcctcttctccaaaaaccaagactcacctgcagtgctgtcttcatccccgcctttcaaatcaaccaaagccaagctgcagcctggaaaatcccacccgtctctgtccctgggaagagcacaaaggggatttcctggaaattcctaaatcgtaagggggtggtgcccagggtaacacatgggggcagagaggccagttggggggtaacccttggcagccatgcggcttgcggggaaggcgaggtggccgccgggttcagcacgggctcaggactcagacccgcacagcagaggacgttgtcagccccagccgtggcacctttcatctgagagacagaaggatgatgacagccttggactccaaggatcagagatggagtcgtgtggcaggcagcgtgagggctggcacggatggcacaggcgaggacttttgatgcaggatttacataaacgttcttagagtgatgttggccagaatgcctggggctccgagtgagctgtggtcagtcccagcaccttcacctcaggactgcaggatccgctgaggccccaccgccctccagtggccatgaaccagcgcccgctccgctcagacaaggctttgcagatgagctgcacctggccctggtcccgtcattcagctagggagatgatcccatgggcacatggccgagtcaggagtgctgttagtgaggcccatacagatgtacaggaaccagataccgtcccccatctcctctgtagcctggggtcccccgcctgccctggggagagagggcagcccctgtttgcgctcccccaacacacacacacacacacacctgtgagcagctcgtttccacaggctggcacctctctgggacgtttgcacagcttttggcagagcaggtggtctgactggagcgtgtgcgtgcaagcccctgtccacacactcccacacacgtgatgctccagaggtacagatgggatggcacggctgccggctgtgtccaaggagaggacaggacagccgagcaagggtcaggcctgtgagcgccggcacctctgggatggccccttgcaggggcagggtcaggggttacctagagcccacagactgccccacctgcgtgccatcagctcctggtgtgtgacggggaaagcacaggggccaaaagggcagtggggatgcttagggagatccgatggggcctcgccgtccagtcccagtgcaggggcatggctggctgcatgctggccgcaggaaaccgttctctccctactctatatcggccgcgagagagcaacgtccaattggagaggcagctggttctactgagcgaccggagaactgggaaggggaaggtgtgggagtttcacgggattgggtgcctgcaggggaggcatgcaggcgtgcggagggttctagacgtgcagacgcagtccatgaacacatctcttcttacatctggtgtacaacatggcagcagtcttcccttagggccggggttttcgtattataatgataagctggggatctaaaggggaccataggccacctgctctggcctgcactggtttcgtgtcggtccgccctccctctggtttccagtggggttgagggggtccctgtggcttcaggaccatctggtctccttcagcacgaatgtctatagataaagggactaaagacaaacagctaaagctttcccactgccgggtggagggctgggaggtctggggtactttgtagtttatattgtaggaaagaatatgtgatattttccaggctgaaaatatatctaggcaacatctgtggacccctcttcatagctgaaaatctcacaaggccccggcagttagtatgggtgcaggctctgaccttgggagggatcaagagcgccacggagcccacgaccccctggggttcccccagctggcctggtgcaccctacgggagggacaccccctggcctccctgggccaggcattcctgtgggcatgtcaaggcccgtgatagggacagtgcccagcctcctgggctcagctccccctgcccctacagatcatggcagctcggccaagggagggctagcagtcccagccacccagagatctccccacccactggccaggccccagtgaggctgacccggcagctggaccccctgcccaggccagacaccgaggcaaggcggggccagcctgctccccaaggcccacagcagacacagagcggtacccaccccccaccccccaccccccgctgtcggcagcttcagcgtggcctgcaaaatgttccacataaaatgctcatttaaaagccattagaggtgtggttgacagacggagatttatgaagattgaggaacatgaggagacgctggtgttgcgggcgctggcgttctccgctgtgtgtgcctggggatgtgaacagcccggcttctatccgacgggaggccccgtctggtgcatctcaggcgtggtgtgctggagagggcggtcccgtgtcttcctcttccagggctcgtcgggaacataggttgtgtggttattttccttgatgatccttcagctgctaacattcgattccaggaagatcagtttctgtcttgtgcgtgtgaaacaagctggttgatgcagtgaaacctgggacccccatgtggaccagcatcgtggggggacagcagagccatggttcaggggctcaggggacggtcatggggctggactttggggccatgacccccggaacgtccctggggtccattgtgtgacaacgcgtctttggctgggaggacccccaggcaggggatgaggtgtaacccaaatgaggcccggccccaagcagactgtgacagggtcatcaccaggaaccacgggggccccagagggaggacttcgtggacacagacgggcgtggtcatcccagagaggacaacaggccctggcctgcgtgagtggccaggagctgagctgtaggcctggggcagctggggcaaagctaaggccccatcgtggccatggcgtcctcatttccagccacgatcaaaacaagaccttcatgggcagcacgtgcccggcagcaggacccctcccaccttctgttccccctgcccctttcaaaccgagcccaagcctaggaacatccaggtccctgagctgctccctccccaggttcaatgcagcccccggctggaaggtggctgtgggtcttgaatctgagacagacccaggcgtggcctgcagctggctccatttgggtacagagacagtgttgggcgccctcagggcttctcgtgagcagaaccaaaggtgttcatgtcatttccacgttattttccttgtgcaaacaagtctgtttccccttctaaaggcaccagctcgagggcttccattagggaagctgcctccagcacgcagcagccatgtcccagggcccccgcctggccccaggtcttcagcagcccctcccagtggggacattgaggcgggcttccctccccagacatggagaggtcatccccttgggccagtctctgcagcagtttatggcatagtctcaaagtcgtaggtgacctctgaatttgtgaccccttggccggaggagacgcagggccctggcattggccaccccactctgcccgctcagccattccaggtcctgtctcccgccttgcacacagtctctcccactttttcgcctttgcctcggaatagaagtcctggaagctgccaaagactcggcgggggtgtgccgaggccagggcgcccctcgccagggctctgctttcagtgtgggtctgtgcttaatgttcagagctgccctgctcttccttcgcccacctcctggggaaattgaatgatggtttataattataaccgcttctgcagcagaggatgcacgttgtcggattttcagcagcaaacaataaaacaacaacaggttttaagacaacggctccaggaccaccgttgccaggcattagtaaacccacgcaggcggccactgacagcagtgtagacgccaagcgagcaccagttcagctcccccgggacccggccttcacccagcagagccactgcccccctgggcccaggcctgctgagcccgagaagctgatttctgtctggcttggcgtatcagagaagagcacacatcgggaccatttctccaccagcccagcttgccttgcatcggccggacagctcagccacttctgaaaaggacacatcggtagttcctttttctcttcctccccctttaaaaagattcatctcccctgcccttgggcaacaagcagagtcttcgggggaagcaccagagatacttctcagcaccagcctccatctgacagagtgagtcatctttaggaagaagaaaatccacaaacatcattgccgccgtgtctaattaggcagagctatgtaaattgagcgcttctacttgattaagatgtcaggagaggcttcgataagacctgagcggttcaagtgtctctcgtgtaccagccgaagatgccccacttgctaatcctattcatctggcgttgtttcctaattagaatatttatggcctaatgaggaggtgaacgtgccgcccgagccccgtcctgaaggtgagagtgggctctgcagacgcaggcgctgttccgattgttgggcagtgaaattagcaccgggccagcattgttctcagcgtcccttccaggctgctcccgaggatgttgattttgttattagaaactgaatccggccttccggtcctatcacaagaggactatcacctggtcacctccatcagcttgaaatttcttcccaaacaaggggggccgaattcgtgatctcctggtctgaaaggattctggggaaagcaaaacccacacctccccgaacgtcttcaagaccctctgcccgcccggtgctgtcatccaatggatggagagtgataacgtggctctgttctactgctcaggatatcgttctcaccaccatcgactttagttaatgtattcacatgattcaaattccagtagaaagtgttcgtcggtgaccagaatgtcccctttccctctgagagcggcgtggctttctgaaggcatttctcccagacagcgagcctctcgtaagccccacccagaggcatctgcctggggagggcagtagcctggggcaggcggggttcagcgtttcccgctggctgggttttgaatcactgtcatggaaccctgttttgaagacaccgaatatggctatgttgtcttgcagaaaaaaaaatattagcaattgagacaaatctgctgctgacccacctcgggccggatttgtgcccctgaagtcttcttgatctcccctccgccccctcccaaaagaagagaagagagggaaggacagcggtgagaaggtggacccagccaaggagccgtcatcttggggcttccacctccctccgaaacagaggcctcggctcccgagtcccatggcgtcccccaagtgtggggcactgagcagccccaagaggaccccaggccagcaggtcacccccaggacgcagaggccgccacccctggccttgggggtgagggtcggatgcagagagagggtcgaggtttgggcgcggtccccacacaggatgaggttcccaggcacgctgggcagtgcgtgctctgaaggttgggccacacgtgagctggcgcccaccactgctgtctcaaggtttccaaaggccagagctggcaggtgtggccacccagcaaggtgagaagaggtgccagtgagttagagtgagggccccccaggccccaggagggcaataacagcggtgctaatggtgacctggtttcatgggggaccctggatggcagaggagggggctgagccacaggatggcccaggtgacccccaaccaactcaggccacttcctgccaagaggtccctccctggtgaggaagctgagtgccccttacacccaccagcatgtagggttcctgcggccacagggcatgagtgtcagccatgctgagcggggtcacagcagagcagggtcaggacagctcctccatccacggacgccactggaggatgagcctgcagcccctgagcagttctcccaccgtggggccacgtgcacacggggtgatctccgtgcctcaggaagctgcgctgcgaagggaggggagacgatggccatggagtctgagaggaggctccattccagcggtggcatttcgtaaccaaagtgccaagtgtggtcccgggcagggctgcaggagagagaagccgtggctgcggaagaaataaaccatttcatggtgcagctccccagcgagccgctcccgtgagccggccacaacatgaaccgtggccaggattacggccccacctggcagcagcggccaagactcccgcctcagagcctccagtggtcaattagtcgaccgctgttcatctgcctttggaactgggcccaggcggctggggtcgtagctggagcagaggccaacgtctccatctgagaagggccagcgccaggcagagggcaggaagaggagggggcggcacgtgggggactgcaggtggggaggagtgagaacccgtcacagccggaagtccaggtcccctgggggccactggcccagccacagacctggcccaatcagcatctggactgggtttaatcgtggtccccagaaaagctacatccacaccctgatccctggcagcgtgaccttatctggaaaaggggcctttgcaggtgtaaagatctggagataaaatcgtctgcattggggtggaccctaaatccttacagaggcagagggagacacaggggagaaggctgcatggagaccgaggcagagaccagacgataaggctacaagccaagggtgcctggagccgccaggaggtggaagaggcaggacaggtcctccctcaagcccctggatggagccggaccctgcccgcgcctccacctcgaacctctggccttccggactgctgtctttaagccacctcatttgaccagaccctgacaggaagcagccagacccagtcccttttgccgagaagcctgtgtctggctttgtgctgaggctttattggcacacagcgtggctgaccatttgcacgtgggcggtgccacgctccaggatggcaccatgacgtgaaagccaggttacttaggaggaaggagcggggatttcatctgtgccctcagcggcacggcccctttggtggtcagatccagggtctcaaacccagagacaggtcccaccacagaggtgcagtttgtattaatcttgttttaactcggtcaacatcgaaacgagagatttctattcaaatcccgccttctggattctctcaagattcaggacctctggtcacggggcctgctttcctgcaaggcaccaggaggcctgggctaagggagtgaccacccagggctctgaagcccctggcccggggggtgcagcccctccctcccggggttccgacgccaggcccaggatgctccctgagtcactgtgtgcggctgttttccctgccgtagagaaatacttcctctaggtctatcaaaagtgagaaaatgaaagacaaaaaggcccgtgcgtctcaggagaatgggagagggaacgtgtctgcggaagggctggatattcccgagggtttcccggcaccccaggtggcatgggccgccccagccccccgccccttcctatcttctgagaagtcacccggccggccccgcaggtgcctttccttctcttttatgtccactgtctcccccacacccgacggaagccactcagaccacggagcacatgccccagcctctgcgcatctcctgctctgtccacgcccagaagcccagtgatcctgttcaaacaccaatctgagctcttgtcttttcaaaccccaccacggtttcctgtctcacccagaaatgagaaatgaacccggccccattcccccggcaccccaagcccaccccgcctgccccagggccttctcgctggctgctccccccgcctacagcattcctcccgagacctccacagctcgacagccacatgtctgcctggcaaacagccctgcctgccgcccggtttaatgtagtgcactgagtgccctgtccctctctcctgctgtgttttctacacggcctctgtccccagctgatatgatactctttgctatttgctgtcggtctcctcccctagagccatgcttccaacctagggcgacgtctttcttgggacactgggcaagtggtggtatctgtggttgtcacagctcggtggggggcaccaccagcattgcatgggtggaggccaggaatgctcagcacccctcagtgcccaggacaccccacagcagagaacgacccagccccagggctgacagtgcccaatttgggaaaagcttccccagagcatcagccacaggagggcaagggctccaagagccactggaacttatggctcagaaaccccaggccactggagagctcaggcacgtggccctccacagtcgggtgtgactgcccggcccctggagagggaagtgttctcctctatgacccaggggtggggggccaagagaggccccagggaggagcccccagcgcctgctggactgacgggacctcccctgcctgcctccatcttgttcctcccagacatctagactcttctaatcaccagcagtcattcctggcagctcctcttccctctgtgcccagcagagaatgcgagagacagagaaacagacggacagacagagagagggggaagcaagagggtcccagcatccccaccccccaacccccgtgtggtgggttttgtggatttaggaagcagagactttctttgtggcctcccctgcccccaacagcaggccgagggaggaatcgctgcctggaactgggactcgctgcctggaactgggaaatgctggtgttttctctgggtttgatccagctcagcacagcagaaagcaaacctggctgtagagtgagaggggagggtctgctggagttgggcttgtggggcgcagtgcagaggctctgggccaccagtgaacacggccagagctagggacaccggaggccccaaggggtcataaaacccacaagagctgaggcagctgcacgtcactgtcctggctgtgcaaagggcagctgagcagaaggttgagtgagacacgcttccttccacgcagcaacccggacagctaaggggccgggtccctggttttcagcccctcatcctgcaggaggcaaagtctgcggagccagaagtggtgagggagagacagtggcagtggacggtccacgagtttaaaggggtgagcagggtgttcaggagggagggagggaagatggcaccccttggggctccccgtgtggccgtgcccctgagcaggggtgatctctcggtgacagcctgggggcacccagcgaggggctccatgctcagcccctccccaccccaggcgagggaacctcagaaaggagccctccgcacccccggacctgcatttgaaggctgaagggctgagcacctcacctcgggggcggctgctgctagttcctgggtgcccgggaaattcacctggacaggtggaatgtgccacccaggcagcacctcctcccagaacagcagcagccccgaagggctgaggggtttggaggaaggagagagccctggggtgggggcggggaaggcttcctggagagggactcagcctgtagcgggaggtgcggggttgggacaccggctggagccccgggctaagagtaggcatagggtaggccccaggtcccttcagcctggagagtcccttctctgatagcctaagggtcagtctgcaggcccagcacagaatctggccagaacgactgccagccagaggcagcccccaccccaccagctcggtgatccatgctagagtggacatagggtgctgagtccctcgggcccctgcaaggcagcggggactgaagtcgacacatagcacgttcgtgcctgtgccttgagagggagctcacacgccaccaaacacaccctttaactgtacgcttcagcggggttcagtggtcacaaggttgtgcaaccatcaccttgacttagctccaggactcttccatcaccccagaaccatcccatttctcctcgactcccttacccccagctcccccagcccctggcagccccaaatcttctttctgcttctacggatttgcctattctggacatttcctgtaagtgggctccttccatgcatggcgtttcgtgtctggtgtctctcaccgagcgtcaccgtggtagttcgtgtctgcgtttcatgcctcttaatggctgaataatattccgctgcatggggcaaccacgttctctttgtccattcatcgctcaatggacccttggctgttcggcccttttggctgctgttaatggcgctgctttgaacgagggcgtgtaagtgtttgtcagaacccctggtttgagctcttttggatacatacccaggagcggagctgccaggccccgtggtgactcttgacttgtgaggacccgccagcctgttttccgtggtgcctgcactccctcctcccacagcatctaatcttcatgccggagtcacattctcaggctccggacagaccccaggtgctgtgcagcctgaggatgagacggagagcaggacccagatctctgtctgctccatctcgcagcttccaaggggatggaggttccagcagtgacagcagggaaggcccttggggagtgtgtggtccaggaggaagcagtgggaacagcgctgacctgagaggagctggagaagctcccagagcagcagccgccgtcgtgctgggactggctctggctcacccagaaggaagggatgcagggcatctgcaagcctgggctacagggccttgggactccttttatacccccatatgtaccgcctctaggtgcagagagcccagagcaggtgggggaggcgtgcttgcagcctggcagatgagaccatccctagatggtggctggggtgggggcagcatccaggagaacttcaggatctgagttccaggcgtggctcctgccagggtgcctcactggctgtgcagccggccagccgatgctgggtatggccagggcacgctcgactcaggaagctttgatgcctttctagggcaggctggccgcctgcattattgatggctgttctgcaaaatttacatgctgagctatggggaggtgagcaaaaaccccagggatggcccactgtggttttcttccctcctcttgaacttgaaaatggccaaatcactttttaatgaattctctgcacctggcagaagcaggaagggtaggggccccagcccaggacaggagcatgcatccagcagggcacacccagctgtgcaggactcccgctgcccgcccagacacctccatcgagggttgacgtggggagcagaggctgcacatgtcagctatggagagaggacgctgggacgctggtccagagctgagtcctgggtcatctgtttgtcctatgagggctgggagacacttgctggcctccagagcactcaccagcccctgacctcagggaagtcccaggccttcatcttctgcaaagtgggagggcgccgtgcccctgtgccacacgggcccttggaggactgcacacagcgaggcctgttggggcaccgggaggaggtgccagacacttctgagaacagggccctgccctgtggttaacgtggggctccccttgcccgcctcacaggaatgaaatgcacttgagggcaaagggagcagcccaatgtaagccttttagataaatgtgtcgaaacctccagccaagccagcccaggcccgctacatgcagatcagccacgtctgcaaggaggcctgtttgcaggagctcccatgaccgcctcatgagcacatgcctgggtcctgcccacccaccctctcaccccagagaacatcccagaaaagggggagatgggcacagtgatgaggtcaggagcctgaccccacctccccagtgctcccaggggagccaggccaaccctgcctggacttcagaagccctgccaacgggaaggccactggctgcttccgggggtcccctgggagagttcttccttcctgcgggtctagcttcctgcccctacccagccaggagacacccctgccctgcctctcgaaatcaagacccagctgccctctagtggcagtcagctgcacacacacacacacaacacgcatgcacatccatgcacatgtgggtttacatgcatacagaggtgcacacatacacgtgtgtatacacgcacacacaggcatgcacactcgtgcacaagcacgcatacacacatgcacacacacaatacactgtacatgtctctgggtttctacgatgcttgatttattttcaatatatagaaaagaatacatttctttcctatacattgaaagcaccacagccaggggtggcttccatgaaccggctctgattggatgactgaagaaatggagacttggagaatgatgtcatgccgcaagtctgtgacagcagtttctctgcaggctgacattcttctccgcttggatccctccctttcctgccggcccgtgtcagtctcctgttttccagtctggtccttctggcggtgccatgctgcgggaggaggcagccacagccaaataaacatgtagctgagagcagcctggggaccctacgctgcaggatgggtggccgaggggggccggtgcaggcaggcagtggggcacctcctgagggggacatcacgcccaggaaagaggctgctgagagccccctgcagcttcaatttccaaatctgtcctgggagggggaagaaaatcggatttgtaaagaacaagagaaacttgggtgagaaatgaagagtgtccacagcgaggctgcctgctgccctgtcagaaaacctgattccgtttcctgggggagcggggactgaagtgagatgcagccacatccctgcagagccgccgccactgccggtacacacagatgggacatggatgaaatgagactccgcaggcaggatcccggcccctcaccaaggtggcatgggtatctgacatttgggttctcattggcaagcctgtccaccgctgctggcaccgtccccagcccatctctgcagcctcctacctagaggcagagccaaccttcaggctccgtccagccgctgcaagggagggccgggtgctcacaggtgaaggagaacacagccagggtggggaagcttccagaggtgggctggctggtctctgccttgatgaacaggagggcacattttctttctgttgggatcctgaggcacagaaaccttggggaagggacctctgctatgggtagtaccatgaagtccaaggcctcaggcccagcgaatgtctggacacacattggtccacagttagaaggcagatcctgaccctgaggttgccaagagcagccagtcaagggtggcgccagctctgctgtttccatgatgtccatcccacattcaggagacccagcgggcatcgggctgatgtcaccatggacatcattggtgctgcctgagtcccatccataacaaaggcctgaagcgcagactgacacagcatcagggaccctgaccggtcccctcgctctgccctggtcagctgtgtagaactggggaggtcatgggactgcctggccctcactggactcagtcttcccctccgtaaatggtaaagaaatatgagctccactgaccacgcagtgtgacaccagtcactgaaatagtgaacaggaacatgcttttttattgttctctccccattgttggctttctcccctccctcacggcctctgcattagcccccaacaatgccctgttctgcaccatgcacctcatacctcctgccccagccctgctgtgcctgcagctcatgctatcactccctcctccctctagtgagcccccaccttccttcctcaaccagctccccttgcacttccgtagaagcctctctcacctccctcagtttccttatctcatggatggatgagaggacctcagcttccttattggttggttgtaatccacctgacataaggagaggtctctttaaagcatggatggatggatggatggatggatggatggatggatggatggatgggtgagtggatggtggatgatggatgatggatgggtgggtggatggtggatgatggatgagggatgggtgggtagatgatgggtgatagatgaatggatgatgcatggatggatggatggatggatggatagatgatggatgagtgagtggatgatggatggatgatggatggatggatgatggatgagtaagtggatggtggatgatggatgatggatgggtagatggatcgatgatgaatgagttagtggatggatggatgatgggtggatagatgatggatggatggatggataggtggatgatggatgggtggatggatcaatgatggatgagtgagtggatagttggatgatggatggatagatgatggatggatggacagacagatggatgatggatggatggatggatgcatggatggattatgcatgatggatgggtgagtggatggtggatggtggatgatggatgggtggatggatggttggatgatggatggatagataatggatggatggatagatggatggtggatgggtgagtgaatggatggatggatagatgatggatgggtagatggatcgatgatggatgagtgagtggatggttggatgatggatggatggatgatgggtggatggataggtggctgatggatgggtggatggatcaatgatggatgagtgagtggatagttggatgatggatggatagatgatggatgcatgggtggatggatggatggatggatggatgcatggatggattatgcatcatggatgggtgagtggatggtggatggtagatgatggatgggtgaatggatggttggatgatggatggatagatgatggatggatagatggatgttggatgggtgagtggatggatggatacatgatggatgcatagatggataatggatgggtaagtagatggtggatgatagaagggtggatggatggatggatagatggatgatggatgggtgagtgaatggatgtatggatagatggataatggatgggtaagcagatggtggatggtagatgggtggatggatggatggatgatggatggatagatgacgggtggatggatggatggataaatggatgatggaagggtgagtggatggatggatgatggatgcatgggtggatgatggatgctggacaggtggatggatggattatgaatggatggatgggtggatgatgcatgatggatgtgcagatgatggatgggtaaatgatggatggatggatgggtaaggggatgggtagacggatgagggagaaaggaagaaggggagcaggtaagggttaacctactgtgagaaaactatcaaagtaggatatagcacccaagtaagtgtaagctatttctggttttttttgtatctccttgactccaagttctattcatcttggtaaatgtcagctctgttagacacgactcattaacttggttccctcaacagacaccgattacctactgtgtgccaggtctgtatctggcactttggacacaaagctggacaagactcagtcctcatggcactctgggtcttccaggagagtccagcctacagcagatgtgggcagggttgtggctgtccgggtcacgctgcacctccagggttaatgagagaagcaaaatcaattccagagactttaggggagctcattttggaaggaagagtggggtctcaccagcggaaggagggagagggacaacacacccgcaagcacagaggggcagggataggaggtgtggggtgcacagtgcagacagggcgccatgtggggcaaatgttggggtaacgagggaggggagaaagccaacagtgggagagaaataatgaaaacctggtttgggctgcacgttcctgttcactgtctcagcaactggtcacggctatgtggtcagcagaacacagtcgtgtcccattttacagagggggctgccaaatacaggaggccaaggttgctgacggctctgcagcctgcaggcccctccctgtcctgctgagcctcacagcctccccctggaaccctctcctgcagggggcctgagccgcccactctccccggccctgcaggagctctgagtgctgcagtcctccccccttctccaggtgactgatctgctgcagggaccacgcaggcatgggccaagaagcagtttcctgcccttccgagaggcccctgacacctgcctccttgagggagatctctcagaacaacagccagggctgcatgatgaggcacatgttggggctggagggcccaggagccagcgccccactgcactgagccctggccccatgtaggctgggcctggtcaccaagccacagtcaccctgttctgggtgggaggccttgtggaacaccccagaccctgattggctgccgtgttcccacctcccgggtccaaccgcacctcccagccctgccctcagttcaccctgtcaccttcaggcagtgtgactgcctcttcctggaagcctcctctggatccccagccctccctccctgagatgcttgtggccttgctctcaggcctgtccaggtggcagtggcttacactgcctgatattggagcccaaggtcagcaaacgtcttctataaagtaccaggtggtccatattttaggttttgtggggcatacagtctctgtgcagatactcagctctgccttgagagtgtgaaagcagccatagataatgtgtcaataaaagagcatagccatgtgtcaataaaactttatttacaataatagtgatgcgcagattcagcccacaggccatcgcttgctgtcatgtataagttggatcctgtgatgcacttaaagcccgttggtgactcacagctgtccacagactgtccagacaccttatggagcacccaggcccctctgtcattcctcagagcttctgttgccaccacaatcattggcaacattaacttgctgtcatggggcacctactctgtgttgggcccacgtttgaccctggagacacagtgggtgatggatgagacagccatggccccccagagctcaggttggcaagggttacagacaatgatcaagggaggacacaataaacgtaaaagtgcaagccaggaatgagtcatggatgaagagcaggctgagctgagagcatgctgggctggagggctgggagagaattccatgggaaagggacatctaggggctggggagcttgattcaagatgaggccacagagggggttagcagccatgacacatggagtgctgtggccatgttgagggtttggatgtatgccagggagcttttgctgcataataaaagatcccaaaacttagcagcctaaaacaaccaccatttatttctatttatttagctcacaattccacaaattggcaatttgggctaggctcagctggaaaacccttccatccttggctgggctcattcatccatctctcatcagctgccagtttggcttggggctggctggtcttagagggaaggaggaaggaatagaaagacagagggatggaaaggtagaaagagggagggagggatggtgtatgggtaggtaagtggatggataaatggatgggtgggtgaatagagggatagatgggtggatgggtgagtagagggatggtggatgggtgggtgggagggtggatggatagatggatgggtgggtgaatagagagatagatggatgggtgagtagagggatgctggatgggtgggtggatggatagatggatgggtgggtgaatagagggatagatggacgagtgggtgaatagagggatggtggttgggtgggtgggtggataaatgaatgggtggctgaatagagggatagatggatgggtgaccacagggatggtggatgggtgggtgggtggatggatagatggatgggtgggtaaatagagggatagatggatgggtgggtgaatagagtgatggtggttgggtgggtgggtggataaatgaatgggtgggtgaatagagggataaatggatggatgggtgaatagagggatggtggatggaggggtgagtggatagataaatggatgggtgggtgaatagagggatagacggattggcggatgagtagagggatggtggatgggtaggtgggtggatggatagatgggtgggcgaatagagagatggtggatgggtgcatgaatagagggattgtgggtgggtgggtaggtgggtggatcgatgggtgtggggcagatagagggatagtggatgggttggtgagtggttggatagatggatggatgggtgaatagagggatagtggatgagtgggtgagtggatggatggatggatgggtgaatagagggatggtggatgggtgggtgagtggatggatggatggatgggtgaatagagggatggtggatgggtgggtgagtggatggatggatgggtgaatagagggatggtggatgtgggggtgggtggctgggtggatggatggatggatggatgggtgatggttggaaagagaaaaggttggtgaccatctgctgtttgtaattccttacggagccagtttatggaacttgagcacgtttcactgaatcacaccgctaggagctggtcttttcccttaacctcttagagaagcacgactcaggattgttagtcacttggagagcatttcacaggttcccttttcgctttggtccccagaatccccctcccctaatggtactggtgagaggcgggctgtggtcccagcagggagctgcccacaagcctgtcctcagctgtcacctcagaagttcatggcctctgggtcagaacagaggtgtggaaaagccacctctgccagctcagggattttggcactgatggactcccagcaagggccctgaggagaaaggccatcagactccttcaatgcctaataaaatgcattcatcctgccaagacttatttgccatttaaagctcacacctgcgcctgcacggtaaactgtcaggactgcttttccagcagaaagcatgcttgcatctccgcacctgcacagagaagggaaagggtttgtcttttcttcccatttgaatatctgacctgtagttcagctggacaagctaaacactcaagaaacgaagtccctcctgacccgcgtctgtggggcatccctccctttgcaaactgtccctgcttggttttctagaccgaatgcaaccccagtgccctctgggctcccctgttctcctcccttctatcttggcaccaaacgtgatctgcccctatcaacggcagggccactgagatgaaaacacaggcaaacctcttcatgccgcaccttaacgcatggcaaggggaggagaaacttactccgacaggcagtgtcaaccaggaggcttggaaagggccctgcgcccagcacacagcccccagtgaaagagaaccggttccaggaactccgttcctgtaaacggatttcttttgataagtgccctgtcaattaaaacccaaactgattttctgttctttctcaactggtgtctcccttccagaaagttcagcagtacacagtcatcgttcaggccacagatatggaaggaaatctcaactatggcctctcaaacacagccacagccatcatcacggtgacagatgtgaatgacaacccgccagaatttaccgccagcacggtgagtccctcgaagctgcccagtgacgcatggcccgtgcagggcaggaatgcactggcgtgcggcacagcctcctctctctctgcggctctgcctgacgggcacttggcagatagcgtgtaagaaaggccctgggcagcggaggctgctgtgtggagtggctcgattcctgatgtgcgcagtaggagagaggccggggctcagtcagggaggggaccggcggcggaggtcggttgccacctgggaggcatctctgtgatgtctggaggagttgactggtactgcctgggctgatgtcactgccactttggaaggcctgcgtgtgggacccgcttggggaatgcccagatggggccttggcatggcgggtccatccctgtgtgtggaacttggctgaccctctgtggcctgctgtcggcagaaagggggttgtgactgggccccataccggctgcctggggcctgagtgaccattcactgaatgttgttgaaagtccagtgtgagccccgagcccctagttcacaggggaccaaactctctctggtgggaacacggtggagacagggctgtaaggcatgcagcccccacttcctctggattccagcagggcagctgcaccaccaggagggacccttcccttgaaatctgcagaggccactgcgccgacagacatttgatgaccccacttccctgctgcccagcgatctggggaggtcccggccttggctgtcgccctgcttaccaaccaggaccctttgtggtgattccctgggtccatggggtgtgacacggtgtccccaggctgtcattttgggccccgtgtggcagtgctgacatcatgggcacgtggcccagccccgggagcccctctagaaaggtcgaaggcaccaggctgggacgtgcagaggggagagtcagcgagggctcccagagtggccgtggccctgagatgccaggatctcagggtcttctctgctcctaccaccatatcacccccttctcccccaggcctaggcccccgcagagctgtgtgtcagtcatgatagcaatgacagtggcacaccagctgcatctgtggaggtgcccctcgggcaccagggtgaggccagggtgcggccagggtacagccagggtgcagagctagcctctgatcccagccaaccccgaccaacccagtgacagatgaggactctgggctccgggaggctaagagggagaggggaagggatggggtcaggagggagacgctcctcccggtgggtgggccggcttgctgagaaggcaactaaggccagagcccctcgccacagcggccgtcccgcatctgggcctcctgcgtcctgcatcccaggcctggggcgcagctgcaccaggcggaggtggctgtgagcacacaacgccatctggtgggaagatggcagatcacagcgaaggaagccagctcagccccactgcagcagggcaggggggctctaggtgctcccccaggctcctggcagtgagtccaggcagcaagcggccagggcaaccaggagcccgaggagcatttaaccgggcgcagccccaggatgcaacagctctcatacaattggccaggaaggcgttcagatggtttggaaaacacctgcttctctctcttggcttcagtctctatttgctctcttccggccagtgagcaatggtcaggaaaagctcagggccaggctgccggggagtctggacataggggaagcagctgctaaccccagggccctgaagaataataacgtccaggcccaagagcgcagcagggctgcacccacacagctggccggacagccccagctgtccttcctccctgactccgagaaagaaaaggaagtgatggcagggagggaggggagaaggtgacccaaattgtgtggagcaggtgtctctgcctttctcggagccagcatccctgtgaaggaagatggagaaccggcaggatgtccctgacctgcacatgctctgaaaaacggccagcccagggagtcacactgagccccccacagaattctgcatttgactcaaggcaacttaaagcacattgcaggggagaattcctgcctctgtgtccccatgaacgaaaggtggggatggcctgattctctgagacgttggggggcagaagataaacaaggggcattgtggtcctaaatcccaaaattcagagaatcccatcattccattgcaagccctacccctcgtctctggtccccatcccgagactctgggaggcaagccctacccctcatctctggtccccatcccgagactctgggaggccaaggcagaggcccttctagacctagtggaccagccacaagcactgaccagcataagcactgaccagcactgatcagccaccagcgctgaccagccaccaccatttaccagcactgaccagaaatgaccagccaccagcactgaccagcactaaccaacactgaccagccatgaggactgactagccaccagcactgaccagccacccccactgaccagcactaagcagcccttggcactgagctaccctcgccgcaactgctgaccggccacaccaccctggggctcctcctcctgggactggggcagagggtccccatggcatttattagagagaggcgtctctgtgcttttccaatggctaagcacaggctactgcagcctcgtgcgcctcccagagatgggccattgtccatccttggttccagggggcctcaggcaggtcccagaccccagatcacggggcaggggaacggcatctcttgaggagtacgcagatatgtctagatgcttctcagccagtgtctgcggcacctcccagtctaacacagtccgggagaggatctgcagtccactgctttggtcaggccggcggggtgacatgctagtgggtggacaatggacggatgaccctggcagggagggttccctccaccctgcggtggcttttccaggtgactgggtcgcatggtcctggagaaggggtgtcagtaaatactcggggttaggatggcccttggtgtgtcctcctagagatgggtgacaggcaggagccccgggacactgtccatgcctcaccgtgggacggagcaggcagaggggccagcaggatggcgaaggccggccacactgccgcacatgccgccaggctatttttaccaagcctaatcaagaacaatcagcagaagctacagagatgcaggggatttgcatgatccgattctgagtcctaaatgttaattaaaagttattttcccttcactggctctgagcgcggctgcactgcccacgtgaggctgagtggggaccctcggccctcagcactccctccagcaggtgagcatggggtctgctgcgctagaagctggtggccacagaggacacaagcttcagaccctgccccaaagcctcctattaacaccgatgggtcctgcagtgaagttctcagggacaggtccagacagcacagagtgaccctggagatctggcatcacaggccttcctccaggccacccccaccccatccacacacatgctcacggagggggggtcccctggagtcaggaagcccagccctggccccacccttggtccctgcctgctgtgtagccaaggccggagagctggacctctctgagccgcaggattttatcccggctttccacctagaattaatcccacctcaaggtgtcgtcgggagcactgctgatctatgtgaaagtttaagacttcagcaatataaatctgctctaaaaatgccatgggtggtgcccagacccccatcccaggggcatggagctgggtggcgagcagacaaggttccagctttaacagacctggagtcctgtcccgtctcggtctttcataggtgaggggcttacaacaatgtcaccaaaaccttctcagcccagtttccccagctgttaaaagaagagggagggccgggcgcagtggcccaagcctgtaatcccagcactttgggaggccaaggtgggtggatcacgaggtccggagttcaagaccagcctggccaagatgtgaaaccccatctctactaaaaatatatattttaaaaaaaaattagccgggtgtggtggtgcgcacctgtaatcccagctactcaagaggctgaggcagagaactgcttgaacctgggaggtggagggtgcagtgaatcgagattgcaccattgcacactagcctgtctcaaaaaaaaaaaagaaaagaagagggaggtggtatatcattgttgtagtttaaaatgcatacatgataagacatattttgtttttactgtatgtcttttgtgaatgatctattccccgtcccaagcaagcatgaataaaatcaggttaatttttttcttttttgagacagagtctcgctctgtcgcccaggctggagtgcagtggcgtggtctcggctcactgcaacctccgcctcctgggttcacgccattctcctacctcagcctcccgagtagctggaactacaggcgcctgccaccacgcccggctaattttttgtattcttagtagtgatggggtttcactgtgttagccaggatggtcttgatctcctgacctcgtgatccgcccacctcggcctcccaaactgctgggattacaggtgtgagccaccgcacccagcccaggttaaatattttttgaataaagagggaagggagtcgtggtggtttccccacagggtctccgaggacaggatgagtgggtccccagcgtttaggatgtgcccagctcagccagtgcctggttatcacagttgatgtggaaatacagatttttctctcaaaggggttaaaaatggttttgccagaggcagggtgtcagctgaacttaggagccctggggtctgtgggtctgtggtccccatgtttttgaggtccttctggaagttccctccccaagccgcccgaggatgctgcctgcggtccctcctcggaagtgaccctcctggccaggaagaagggcagccccagctctgcagggcagacaggctactggccagcctcagcgggggggactggctgggctgacccagggcagctctcgcccacagatccccagcccctcaagcctggctgcgtgcccactctggccaagccctgtgagtccctgacttctgcagaagaagggagaaattacgattcagcgtgagttcctgagcacaggaatttggcatcttaaaattagaacggactcagtgcccttaattacgcttgggtgcacagtgcaagcctcggccgcacagtgcaagcctcggccataaatcattaattggagccaacttttccgagcacagaggtggcagccgcagggaccaggagctcccacccacccgacatcacctcccgcctccttgctcctcctaccagggacggcttcccagagacggctgcagagggggcgcttctgagaggccaactctgggtccaccctggggcagggaccaacaggacacaggcccagagacgtgggggaatggcggactggaaaggacaagcccaaggcagagacacacagaaacttgaggtccctcagcctgggggtcaagacttagtcctcccagccgcggtgcttccgccagtctctcaggcctccttggacccgcctgtccaagctgcatgggagagatggggcccaggggttgggggtgggcgctgggccagactccccagcttcaagcctggctccacaactgaccagctgctgaccttgggcaagttgcctccctttcctcatctgttcctgcctgatgggtgtgtgaggaccgaatattcccggatatcagtcccttggcagcgtacctgactcaaagaaagaccaatgagtaaaacagcaacaatatggccatcgtggctgttgtatgattaataatgccgattgatagcaattgtgtccttcaccctggcacagatgagctgctgacaggagctgcctgaagttgtgctccaatcccgggtaagaagatgggtcaacctctctgtcctttctgggaagggagcaagccaatctggtctatggacccaaaagcccaaaaaggggtttcaggttaatttttagctaaatgactggtcctttcactcaagcgggtattgcagtgagcaggagcaggagcaggaggagtaggggcaggggcaggggcaggggcaggggcagggcctgcaacttccttctggtcacaagagccacagatccgacaattctgatttgtgaactcagaactcagcagaaatcgtcactgttttactgaatagaacacagaattgcaaaaagcaataatgttgtaatgtccaaaggagctgtggtttgtaggtttacgctatcaattttccaatgcaagcaatcacagaacagagaactacagctggctgtgtccccaggtggctcccagccccgtcggggggcgcagcagaccacaccccagccagacaggagccgtcagggccggcgctcagctgtgctagttacagtgatggatccgctgagctccggctgggcaagagcaccaggcttgggcacttccctccaattagatgccctcgtccacaccgggctccggccgggagaagcagcacccaacgccgggtggctgggaacgtcaaggcctcattaggaccagccggacgcttctgagtaagcggcagctcagtgaaagcatcaatcccacgctggcccatggggttggggtgacaagggcagcagcagagtcccatttccgctcattcagacctgctccgtgggaagaggcaaaaggaggtcctgagccttccaggagacaaagctgggcctcagtggcaccactgtccgtcagaggtggaagtaaagttcgcagtcggccgtggctcatctttatgagatattgactcaccgccactagtctagttgccaggaaacaggatgtgggagggacagacaaaaattaagtacagcagcaaatcaccaagatgcagtcctgcgtgtcacacctgaggagcagcctggagccaggggcaccttctggcttccagcaactgatggaaattcaaaccatgacgtgttcagtccttggagttccagaatcgtgaaaggcgggtcctcggcaggcgtggaggcatcgtggatggccgttttcagagcagggcaggcagcacaaacggatgaacgatgcagaggcagaaaaggtcaagccggggcctctgaaaccaggacccccggggcctccattccaggagaagcagcctcactctgcccttcaccagccacggagacccggggtctatgggcagtgccctaaatgccagccatgccctggggcacgcggtcaccaccccgcagaaccgctcccgtgctcgttgcaggagtgcaagggcagatccacagaggagcgtgcggggccccaccttcccagggatttgcaggcaaatgagcggccgttgacacagggacaggcacaccttttcttgaatggtctggagagtaaatgtttgcgctttggctgccggaaggtctccgtggcaactccgaaactccgccattgtaggacaaaaacaaccacagacaaaacagaagcgagtgggtgtggccatgtcccaataaactttatttacaaaaacaaaaagattcaggccacaggcttgttgtcgagccctgacttcacctatagcaaagaggctacataggtgtcgttttgggaatatttgaaggaggaagattctagcattgcagacgtctaagtatgaggtcagcgcctcgtcaccacctgtctcagagagctgattaaaaatctcacaccacacacagcagaggtggcacaggcctgtagctccagctacatgggaggccgaggcaggaggatcacttgagcccaggagttcgaggctgcagtgaggtgtgatcatgccactaaactccagcctgggcaacagagcaagactgtctcaaaaaaaaaaaaaaaaaaaaaaaagacacacagtattagcattgaattaaaaaactaaatatcttaggaaacttcgtgtgccacgtgccaggccttgttcattatgtttgcacattcattcattcattcattatttcaccccgcactgggcactccctatgccagggtacaggacagctacagagaaaaccaaagcagtcacagcccctgctcctcagaggttaatctacatatttaaaatctgtaaggccaggcatggtggctcacgcctgtaatcccagcactttgggaggccgaggcgggcagatcacctgaggtcaggagttcaagatcagcctggccaacatggtgaaaccccgtctctacaaaaatacaaaaattagctgggcatgatggcgggtgcttgtaatcccagctactcacgaggctgaggcagaagaattgcttgaacacaggaagtggaggttgcagtgagccaagatcgagcaattgcactccagcgtgggcagcagaagagactccataaaaaaaaaaaaaaaaaaagtgtaaatgtacatattttatttctgtggattttggtttttcccatttttctaccatgagcaattgttattcattcgcggatgtataattccccattccaaacaaaaaccgtgaaggtgacctctcaagacaagcagggtatggggccgagaggcagcccccagggggccagtgcagcctcagcgacccttccccaccgctggtgacctcgggcaggttgcctcctggagcctcagtttcgttacctgcaaaatgggaacaataatataatcccctctgcctcctgctcccaaaatgctgtcattctgtttccctggggttgtcaccagcatgagcccaaggtgccccttctctgagacaggcctgtctccttgcgagggcccgcaagcttctcctctctgctgctgcccgctgccagctgttttgcgtttctgctcttgcaaatgtggcttctcttggtgctttggaggcatctgagtggccgcccctgggacttcccccaagccggcgtcctgtgggcttgccccagcgggggacagcagccagtcctgagagtatgggctgcagggcccgtagccccacccacaccgagctggcgggagccgtcatcggggcctccaccagggattggatgttaggggcatgaggatcagcacggcagcaactcactggaaggggcgcaggcgtgccaggggctgcggctctctcgtggggctcccagtcctctgggtacctggagttcatggtcatggagcatgggggtcaccaggcagctgctgggaactggtgggatgtgggacagggtgtgccctgtgctctccctggggactctccggcagcttctccctcttccgtctctcccctggcccccttctttcttgatgaaacacctgcctgggctggagtcctcacgcccaccagccagaagtcagctttgtctgcaccgtgtccccctggtctctcggcatctcggcaggcacagaaatccaccccttagccctggtcattacagcagcaggtgggcaccgaccctgtaccaggtgctgcaccgagtgccctgactgtgccagcccatccgaccccacagcctcctgaagaacgggctccctcctccccgtgacacagaggggaccaccctgctgtggggaacagaacttccctcccactgcctcccacgtggccgcttgccgtgtggcagatgcgggacttctccctgaagacaggaccaccgtggccccagcataggtgccttggaggccccagggtcttgctggacattgtgtggatggggcctggccctctcggccctgaccgcccactgacatcataagggaacagctgggtgggtttttcctgaaacaccggctgtgctgcagggttcctgcccaaatcctcctcttgcgaatggtgaccttcccctgagaagctcacagtttctgcctcagagctgggattgtgccggaaggccctcgtaggaagacaaaatcctcctacctctcgggatgggtgcacagttgaattctagattacagtctcggcaacaaattccattccgatgctcttaaaatttctcctttcccaaatacctgccttttcatcccaaggggcctgagaggctttccttgtgtcggaaaatctgaaaaaattaaatttaaaagtcattatggctgggggaaggttaataagaaaattctaaaccagatttatcagctaaggccttctttgtgaacctttattaaacttgcatgatttagaatagactctttgtataaacttcactcagaagtctgcaagggaatggacgcagagagcgccgcgctccctcctcagaaggacgggagtgagtggagaagcgtcagacaggccctcgctaaaacagcagacaacaccaggacccacctggccatgtaagcagagacagacgctacagaggatgtgaggggccacaaaatccaaggggccaggagcttcaggcacggccgctccaccaggagggtgccctcctgcccccaccactaggcacagagccttgcccctgctgcctgcaagggtgctagccacaccttctgcctctgctggctccaaagctcaaggaatctctgcagtttgccaggatcaggccctctctgcctctcttctgaaccacagacagccaggtgcacctggctggcatgtccctaggtcacttacctggttgtggctgtagaggaggccaggaaagtggatatctggaaaataaggaagggaattcagaaggtgcaggggaaccaggaagcctcactaatgaccactatgctgaccctggcagcttgaaaaaaaagagagtggctcatctcacaagagctgagaagtcttggaaaatctctcccttcaggcatggctggatctaggctccaccagctcaccatgacgctcccctggaccatgcttcctccagccggctttgttctcaggctgcgaatggcggctcccaaccaacccaacaccttcagattcacgtggttaccatgcccaggccagacgcaggggccgccagaactgacccctaattggctgacttaggtcattagcctatttcaaaccagttattgaggcgggggcctcaggggtggagaacaaggatctgaagcattttcagtgaaggaccagatagtattttcatctatggtcaggctgtctctgttactgcgactcaatgccactgttggggcaggaaagcagccacgggtgatatgtaaatgaatggggtgtggctgggtgtcaataaaactttatttataaaaacaggcctcgggccaacaccacactagaccaagctgaccagagcccttcatcccaccaagcccttaaggaaacttggggtgacatggccgcaggaccggagcggcatggtcctgctcaaccctcccacagaggcctgaaggccagaagctacagagggctgccaagtggctcccgggggaggccagcaggttttcactcaaggaaggagaagcgccctaagattcaggcaggctgctttgggggcaaggcagtgtccccagcggagggagtggccctgagccaggtgtcagagcccagcagtgtgtgctacggggccctggcaggctgctttggggcaagacggtgtccccagcagagggaatggcccggggccaggtgtcagagcccagcagtgtgtgctgtgggccctggcaggctgctttggggcaagacggtgtccccagcagagggaatggcccggggtcaggtgtcagagaccagtggtgtgtgctgtggggcctggccagagcagcgtctgtgtgttcatggcatctctggagagggctcagggtcctggcacccaggacattttgcaactcagatctccggggtcaggggagctcactggccttgagtcctccaccagccactgcaggggtcacctgcctgcctcactgacgatggggcaggccaccctcctccctgctccaggtctgcaaagctcccccaaccctgaggccctcccaccaccacctctgcctggagatggtccaagcagggagtgtataatgtgacccagctaccacctcccctgaggacaccagggggactatcacctccacctcacagctctgtcccacccccaggcccccccgggcaccaggtcagctcctagactcacagcaacacggacctggctgaggagggctgcccctcccgcccattccccggcccttctggaacttgttcacaggcctcagcgaagcttccttgaatgtccccctgcagtggtcctctgcccggggcctggccgcccaggatcccgtgtggccacagcctcagcaagggctgtcctctcacacccaaggactgcagggctgagatcaggcaggcagctccctgtacctcactctcaggcatgttctcacccccagaacatatggatctccaaccatggcctgagtcgcccctgctatcccccagtaggcaccatcccccatgccatgatgccttgcagtgcagggcccagtgtgtcccacggcggcgccagctccttgtcctgctgggggacgatctgactcctgggcggctcaaaacgtgtgatgaagggaagacagagtgagtcccgaagctccctcctctagggccaggtcagcgtctccaggcctccccgggtacccagctgcaggttccgggctctggccacctggctcaggaacagagacagctgggagattccgtcccacactagacatcgggagtggtgggggcggtagctgtccactctggagtttagcaaagacggttcctcccaatcctcagatgagatctgtggctgagcgtggccatcgtgtgaggaagggctcctgctccacagacagggctgagatcccactttggataaatccacaatttttcttcctaacaagctgattgtatcgggatgtgaatgcttggacctaaacgtgacaggcagggcccttcctaccagacccagagctgggccgggctgcggggttttcagcccagcttagagccccaggtcgaggaggctgattaaaggactttctctgagcttttgaaatacagagaaaggacgcagtgtttgtctgggattaaattggaatatttttccatccttgacaaggcagcccgttggtgtgggctctgaattcttctgtcgcgtcgccgtcctttttaggaatgctgactcggctcctgcctgggaaaggggaccagcgtatttcatttttgtgcatttatatgaaggctatcactcattccttcattcattgattgggccagcagggacagtcgccatctgtatttccccggaccctgttcacctgatgtctttgtccactggtctaatggggcctccacgctcatgacagatgcacggaaggggcgcgggtgggtcgggtgaatctgcgccatctcacagcctcctctcacaccggctctgagattctgggcccagaaccgctgcctcggggcctctgtgtgcttctctgtccttgcaggacctgcctgtggcagacgcggtctgctggccgcccgacgcccgtttcccaccccttctccgtttcccacctcacaaggctcccttctttgggcttgtggtggccgtgggacatcgccctgtccaacgggagtgtcagcacaagtcagctggggaggggcactccgggaagactctttcttaccgaagggacagctgtgcttctcaggcagccagagggccaggccgagctgcagggtcctgaccatgggaggccggggaaggacaaagccccgtcccaacgggcccagccacctgcagccctggaaggtcaggctcctgggttcaggtcaccccagtgcaagtttctgtttgctgcacctgagggcttctccgtgactcctggctgagggcaggtgtgaaggtggcctgggtaattccccagacaccctaacggccttgttttaacttggtcacctctttaaaagtcccatctccaaatacagtcacactctgaggccttgggggtttagggcttccacacagaaactccaggacacaacattctgcccctaacagtgcctcatgccaggacacaggggcttcccacccggggacactcccggtggaaggggagcagagctgcctgcagatgtgcacagcagccctgtcctgatgctccagcgcccgtcctgggaggaagggtacctgatcacagcaccgtcacatcacagagcgctgctcagccatctcagctgcacgcagcaacacaaaggaatcccagagccacagtgcccagcagaagccagacacaagtgctggaaggttccgcccatgtaaagaaaaaacccaggtcaactcatctgtgacgccagaagtcagcatgagcttgcaaggttcctgcaacaaatggccacaaactaggggcttgaaacaacaggaatttattctgtcagttggaaatcaccagggtcttgctccctctaaagactccagggagaacccttcctgcctcttccgggttctgctggccaccctggtgttcctgggcttgtggtggcatcactctagtctctgcccccatctcccacggcctccccttctgaatatgtctgcgtcttctcttctttgtgaaatcccctctgcctccctcttctgaagatgcacatggtagcatttagctcccacctggataatccagaaaaatctccccagctcagaattcttacctccagcaccttttcttcctacaaggtggcatttctagctccaaggattgagatgtggccatatcttcggggacaccattcaaccagtacaggtggaaactttgggacctggaaggggtctggggtggggactgggaatgaaaagaagtgcccattgttgaagccgctccatcagtggccctctgccgtggctgcagggctgacgcacctgccgggcaggtctgcacgcctgcttcagtggggccccggcagccgtgctatgaggcgtgcactcccgtgcacccctgagcagcctgtcttctctgattcctgatctgggcgtggctgacacggtgtgttctgtttgtgaacactcgttgagctgggctgacacggtgtgctctgtttgtgaacactccttgagctgggctgacatggtgtgttctgtttgtgaacactccttgagctgggccgacacgttgtgttctgtttgtgaacactcgttgagctgggctgacacggtgtgttctgtttgtgaacactcgagctgggctgacacggtgtgttctgtttgtgaacactcgttgagctgcacatatgctacgtgcacttctctgtgcatatttacacttaacacgggtttgtgacattctttccttccattttgcagtttgcaggggaggtccccgaaaaccgcgtggagaccgtggtcgcaaacctcacggtgatggaccgagatcagccccactctccaaactggaatgccgtttaccgcatcatcagtggggatccatccgggcacttcagcgtccgcacagaccccgtaaccaacgagggcatggtcaccgtggtgaaggtgcgtactcttctcacaccctgccaggcaccccaagttctgccacctgcacactccctaggaccagtcaaacaggagtgatactcggtgtaaagttactgcccccctaatatccaagggtagaggcaggtaacccaacctgctggaggcagacacaaccttcacaaggacctgtcatgtgaccttcaggggcttggcagaccccccaaaaataccctcccattcccttttcaatgtctatatattcactcccaccccctaatctagtaatgggcgaatttcattattagaattcctaatgttaaaccatctttgcattcctgagacagatcccactgagtagtgaggtaatattttgtaacacattgaagaatttgttttgctgatatttgaagtttttcatgtacttttctgggtgatttaggcctatagcgtcctcatctgggttttggtatcaaggttacagactaatctcaagagtttttctgtcccagagacaggtcttatgatgctgtaataatctgtcccctgaatgtttcgtcacactgtgctgtgaagccattgagtagctgtagattttgtctttttggtcgtgcttctttttgttttggagagagatcggtttgtaactactggttcaatttctttgatggttttggtcagatatgttcttctagaaaagtgtccatttaatctaaattttcaaatttacttataaaggcctatcattatagtagtagtgattcagtcttctaatctaactctttttctacactcataattcatattcccctggaagggcagattgggaattatatcataacacttagcaatcgtttacaacttagtgtgaagaagtttagcagctattgtcccaaaacaattttgaataggactaagaagaaaagagcaagagcacattgggcatttttagagaaaaggaggggtgacagaatggtgagcttaaagctgggtaggatctgccgaagcgtaaggaaaagcaagatgagcttaaagctggataggatatgccaaagcataaggaaaagcaagatgagcttaaagctggataggatatgccgaagcataaggaaaagcaaggtgagcttaaagctggataggatatgccgaagcgtaaggaaaagcaaggtgagcttaaagctggataggatatgccgaagcgtaaggaaaagcaaggtgagcttaaagctggataggatatgccaaagcgtaaggaaaagcaagtttcattttgagttggatcatttagaaatttccttcagcagcccggagcagagacttaaccacagaaatttaaatactcgagagttgtattctctcacgtgagaggagtctgaggtgggcagttggggccaatgtcacagctgcacaatcaacagaaaccctggctgcttctatcctctgctctgctgtgcacacctttcagcttctagggcccctcgtggtccaaaatggctactagagcaccagccattacgagacttttacaggcggtaggaaatcaaaaaggggggaagaatggctcacccctcctttattaagggaccttcccagaacacctgttcacatcttctggggcagagtttagtcacatggccattcttagccagagaagacactgcataacataattatggaaacatatcccaaacttctcctaaggaagaggggagctagatgttaggagatcacaggggaagaaaataggctttctccaggatctgtgtcttttctcaacaccccaaagtcatctttttccttttcttaataacctcttttgtaagcaagctagtgaagaccagttctcctgaaaaatcttataaattcttcatcatttttattttatgaaatattcaaacatacacacaagcagaaataatagtgaaatgaacttccgtatacccatcacctagatttaattaacattgtgctacatttactaaatctttttattttggctgatatgtttgaaagtaaattagcatgtcacagcattccagccctaactctgtataagctttcttcttcaagagaggctattttttcaccgtaaaagatagttcttagagaagaggcaaaatacacgtttcacttcccctctaattatgaattttcagagtgaggtattagcacagccggccccccagtggcaaagtcagatctgtgtgcgcagggactgggcatggtgaggaaggatgtggcaaaccctttctccttttctctgggcgcatttgacctcaagctaacattctagctctggcctctagaaacccacaaggtgaatcgtcagctgctttgctggcaacgttgctcatgggaaggtgatggagactggatgtgacatgcaggcagaggagaggagtgagccgtgagcccagagctggctggggccttccccagtgagtagcgagcctcggcccatctcctgcttgtgattccaaggaggtatctctgactcccacagctcggattctgtggccttcacggggagcacaacgggcagcccccggccccaggagatcagcacctgtctcacctcccctgcccttggagggccacttctgtagctggagcacacacagccccgccaccttcatcagcccaacatagatcagaaagggccggtaccaaggaagaaggctggctcgatgtggtggggaaagcctgacccctaaggactccagggaaggtggcttcctgcccagcccaggggctggtggcctcagccgtcatgtgcctgcctggccctatctgcgcggagcatcacagccacggaaagtggaagagcacagccaacttcagggaagcgccagtgtcttgggactgcatgggcctcgtggcactgggccaggccctcagcaggcccacggagccccttggcaggcccacggagccctcttctgttcttcagagaggagccactggttccaagcatatagcacagactagactgtggggcatggactgagggtcccaggagggcctgggcaccgccaccccgggaactgattcctgagatgggaaatcatccccttccggttcttcctccagctggggatgctcctgagaaggccgctgggagagtaactcctccagggctcagctgcttggcagccatatcctcacagcaggaaggccctggctggcaggtgggtggggcatgaattttggaggcagagaggaggtgctgacagcagccaggtgggcacagccgggcacattcactgacctattgccatgtgacagcttggcagcgggccaccctctgctgagtttgtgccacgtcccttcccctagccatcagggtctcctgtccagctccaccctctccttgtcaggcctctgtctacgtggtgagaatggggtttcccgaagcatgtctacagaacgctggttctcaggatgttgatgagtgctgcctgcgagccacgttcgtagctaaaatctccccaccacctgtgcctcctgcccccccacagccagtcaacatcagtggcactgaggccattgaggggcctgtgaaaggaagatgaaacctcaggaccccaaacccactatgccaagggaagtggagcatggggactgagtctcacggtgctgcctcccttctgtggccacacaggtagctggggcttcacacacctaccccggcttctgtgaaacgtggatccactgagcactaagcagagcctcgcaaggatgtagccactgtctcattgcctacccggcccccgcttttttctcctttcctcctccctctcctgtctgctctttcctctttaaatattgaagtcctcaaaaccctctttgggaaaagcacaggacacagatcccactgggacttgtgcttcttcttcccgggtgcgggctcagcctcggcagaataaccctggaatcaacggagatcggtgcgggctcagcctcagcagaataaccctggaatcgactcagatcttgcaggccccatccctcaggcctgggaggcttggagacctgccatgctcaggggaacaaacatagcccctgcctggtaccccgcatctcccaccagagcaacagaaactagaaaggtgctgccactccacacccacaggcgggctggcacccaccagcagaaacccagatgtgaaaatctgcagattttcagatttggggcttggggtgcattttaccttttcacagctgccgtcttccccactgggcacaaggaggagcaaaccaagttcctacagcactgcctgctgcatgtgcctggagggctgcagctggctcaagtcttcatgacctagagaactagtgccgtccctatttctgcacttctccagatctccagcaccctgaaactcccagggagcctcaggccaggccccaatgtgatcagctacagtgacgttgggcaccgataccaggtgtgccatcctcacccccatctcacttggtcctcacgcccaccaaggaggtgctattcttgtcccatttcacagatggcataactgggagcccacacacaggatcacacagtggggactgtacaagctggggctggaacctgctacctctgccataaagccatctgttaaccgtccaggttcctcgctggccctgcctatctgactgagccaaggtgtctgtgtgtgttcaggacaacgttccacaggtttgaggccgaggctgagggctggctgggctgtgtctgctcagaaaccagtcctcttccagggcatcctggcaaggccagatggtaccgtctgaccagcctgaaaccttcctagtgccatgaggaggggacacggaggcttgaggaggggtccaaggcctcctgaggcagcatgaaactctgacccagctgacggtccccagcccaggggccctgagaccccatgatgcctctccccagctgtaagcccaagtcctataatgggaagctgctcagccgtcaaaaggaacaaacgggagatccatgtgacacgcgatgggtctccagtgcatcacactaagtgagatgagtcagaaccaaaaggtggcctgttgcatgcccccatctgcagaacatcccggaaaagacaaaactgtggggacagaaaacccttcaatgctttgctggtgggtggagaggaagggactgcaaaggcacagcatgagagaagcgtggaggagacgggactctcctgcaccttggccgtggggctggccgtgcttccgtacacttgttaacattcctgagagtgactcttactgcatgtcaattttcaaataaattttaaaatttgaggagctgagagcacagacttgcagccacactgtccccaaagagtcatgggtcattgtgtcctaggtagaattcaacaggagaaccacactttttcttttttctttcatttttgttcttactccatatagtgcttttctctgaagtttcaatttagaatctgtttaaggtgtgtatttagtctggggatgcttcgccttagaaaacatttccaaaattggttttgcattctttggtagagacgtcgtcttttcaggcattctctttcggagcaggggagtggggtggaggggaggggttggggagtggcgggtggtgtgggaggtagaaggccagtgcagggaccccatggcccagcccacaggagatgtccagtatcttgagggcatctgttcttagattcccacgctagctctttgctcacttacccctggcatggaccagccacttaatctctctgtgcctcagttacctcaaacataaaatgatgcaaattgtggggcctatgcccagaggcttatgactcacactgaaatagaccctggatataaatgatttggcacagtgcccggcacaaggtaaggactgaatcaatggtattagctgctgtcgtcatcataaccattctcgttatcatcatcatcatcctcatcgtcttcattgtcactgctgtcccgagctggggagaggctcctgatcattctccctgcttagttccccagagcatgaaggttactttaattccatgaagggtcccctgagtccctcagaagagcaggcaccatatcatgtatgtacactgcagacctgaccaggtcactgctcccaaccttcagtagtttatagtctgcagaggggatggtgaggaggaatcagtgaaatattttgtcaggtacacactggaagccccaaatccagcaatgcagcagtgtgctctttccttctctaaaccgacttagcttctgtttctagctgggtccccccaggtggtggtaagtggtagactggcatctcttctgcctcccttttcacacagttgtgtctatgctctgggctgatgcagtgccctgtgcagggaaggagagcactcctgggcaactgtcagaggtgtttggtcacctctgttctcagccatcagtcacccaaatcctggctgcatcatccttcacttctgcggtccagctcggccactgtcaaaagaagtccacaggcatctcgggcacgtcatccagatctgtcctgccccacactcccaattccatctccctagccataccagccggggatgaggaatgcgccttgccacctcccaggctctacctgaggtgggcacacagcttctccgctctcaggtccccaaacccaaataccatctgttaccatcataccctcctcagggcccagcacggcctcttgtctccctcctccagttgtgaaatcttatcttgaaggagcaaggcccaggtccaggctcatcccaggttctttctcgtcttacccatggccctcagttttaaagctaaaaagccaagaaccggcctctgccacttccccttcgggcagcaacagagctggccttcctgtgggaggctcgcaggtgggaattccagggagagcaggtcagtgatggggtcagttcaggcaactcctccccaagacaggggcgcagagtgagactttgaatggaagctcctgagcctcccatcggaggggagcagggcagacgtcctggtgtgtccccacctggtcctgcccactccgcccagccggtgctggagctgctgctcaggcacacgcccagctgctcacctctgagtgaagggtcatggccacgtgtgggcggcagccatgctgagcctcagcgagtatatccagccaccctaatcgaaactgctggagcaaattacctattgatttctccattacaaatgtgttttattttatcttcctgtgggcttttattggccataatcatctttctggaaggcctccttgctcaggctggtgacacgattttttaacgcatgacatgcagcattattccatgtccccgggaacatgagccaataaatatgggagaaagaccacttccctcaggggcttgttcatagcgctaccacgacgtgatgaaacagtctagccacatgagtggccccgtcccagccagctgctggagggcctgggggggcagctgcaggcgttggcatggacagctctgggggggaccccaacacgatgtgggtgcaggcaggtgctgggagcttggaggcatctggagtccagagacagagggaccaaggccagacttgggggtacctgagacccctggtagaacctttcagaggagtgtgctgggttattctggatcaggcgtcccttcaggcttgcagtcagcttgggctgtggaaggttctgcagggtgacagctgcaggtgtgaggcccctgtgtggcacacacaaccccaagatgggcctgggcagtggtggtgaacaagggggtgcccactccctatatcccccaggcacctatggggcacagatgaaccacactggcgctgtgctggacgctggggaggcggaggtacagggcacagcccctgccccaggggtggcagagtcagggtgggggtcatgaaccaacgcagtgagaggtgacagcgtgcatcagggagccacgaggcatctcactcaggactcagggaggctagcagggaccaccccttccttcagagggacaaggagaccacccctggggaggatgagggctcacctaagcgtggtgtcgcggtgattgcgtggaagcgtggtattgcagtgactgcgtgtcacccccaggggcagtgcagggaccgtggggacccaggaccagaactgtgatctctgccactccctgcagaccctcctggaggcagtcatgggcttccaggagccaccgtctcagttttccttccatgcccatccaatactattatttaggcaattttattttttgagacgaggtcttactctgttgcccaggctgaagtgcagtggtacgatcactgctcactgcagccttgacctcccaggctcaagcagtcttcccacttcagcctcctgggtagctgggactacaggtgtgtgctaccacgctcaactaatttctttttgttttgtagagacagcatctcactatgttgaccaggctgctctcgaactcctaggctcaagtgatcctcctgcctcagcttttcaaagtgttgggattacaggcatgagccaccgcacctggccttattgatgtgatttttaaatttcttctttttgtactgaaatatcttattcagtagcagtgccgagaagtcctgagtgtgacataccagattatgtggttgttcctgcttggaaagatcaggccctgagaggctgtggtggccccggagatggggtggagttggatctgttcagactcaggtgcttcactgccggccccaagcatggggagtggggttcaaaacagcaccttgtgggtggaacaccccaggttccttcctgtctcacctgaggccctcagcttatgaagctccaaagccacaaactggccttttccgctccactgtagacagtgcctggcctgcctgcctgcaggtggttcacgaggggtgggaacgtggggacatcacatcagtggcgggacatggtgccctcatgcttcttggggaaagctgattgattcctccagcagataagttcctctctaagtggaaatgtcttacactgtttatcatgaaagtttccaggcattcctagaagtaggaggaacctgcataattgcgtggaagcgctgtgtcatgatgattgcgtggaagcatgtcatggttgcgtggaagcgtggtgtcgcggtgattgcatggaagcgtgttgtgattgtgtggaagtgtgtcgtgattgcatggaagcgtgtgattgtgtggaagcatggtgtcgcggtgattgcatggaagcttgtgattgtgtggaagcatggtatcgtgattatgtggaagcgtggtgtcacggtgattgcgtggaagcgtgttgtgattgtgtggaagcgtggtatcgcggtgattgcatggaagtgtggtgtcacagtgattgcgtggaagcgtgtcgtgattgtgtggaagcatggtatcgtgattgtgtggaagcgtggtgtcacggtgattgcgtggaagcatgttgtgattggaagcgtgtcacggtgattgcgtggaagcgtggttttgtgattgcatggaagcatggcgtcacagtgactgcgtggaagcgtggtgtcatggtgactgcgtggaagcatggtgtcacggtgattgcatggaagcgtggtgtcacagtgattgcatggaagcgtgtcatgattgtgtggaagcatggtatcgtgattgtgtggaagcgtggtgtgattgtgtggaagcgtggtgtcatagtgattgcatggaagcgtgtcgtgattggaagcgtggtgtcgcggtgattgtgtggaagtgtggtgtgattgcgtggaagcgtgtcttggtgattgcatggaaatgtgtgattgcatggaagcgcagtgtcacggtgattgtgtggaagcgtgtcatggtgattatgtggaagtgtggtgtcgtgatgattgcatggaagcaccgtgtcatggtgattgtgtggaaatgtggtgtgattgcgtggaagcgtggtgtcacagtgattgcatggaagtgtggtgtcacagtgattgcatggaagcgtggtgtcacagtgactgcatggaagcgtggtgtcgtgatgattgcatggaagcgtggtgtcacggtgattgcatggaagcgtggtgtggtgattgcatggaagcatggtgtcacagtaattgcatggaagcgtggtatcatggtgattgcgtggaagcgtggtgtcgtgattgcatggaaacgtggtgtgattgcatggaagcatggtgtcacagtaattgcatggaagtgtggtgtcatggtgattgcatggaagcgtggtgtcgtggtgattgcatggaagcatggtgtcacagtaattgcatggaagcatgtcatggtgattgcgtggaagtgtggtgtcgtgattgcatggaagcgttgtgtcacagtaattgcatggaagcgtgtcatggtgattgcgtggaagcgtggtgtcgtgattgcatggaagcattgtgtcacagtaattgcatggaagcgtggtgtcacggtgattgtgtggaagcgtggtgtcatgattgcatggaagcgtggtgtcacagtgattgcatggaagcgtggtgtcgtgattgcatggaagcactgtgtcacagtaattgcatggaagcatggtgtcacggtgattgcgtggaagcgtggtgtcacagtgattgcatggaagcgtggtgtcatggtgattgcatggaagcatggtgttgtgtaaatctcacagtgataggcacgctgctgcgtggcaatctgcactttttgcaggagtacgtttttttaattaccagacctcatgatcctccgcacctaaatctgtcagaatgcatcaccctcaaaagcacattttgggcagggtgcagtggcccacgcctgtcatcccagcactttgggaggccgaggcaggcggatcacctgaggtcagaagttcaagaccagcctggtcaacatagtgaaacctcgtctctactaaaaatataaaaattagccaggcatggtggcgggcacctgtaatcccagctactggggaggctgaggcaggagaatcacttgaagccaggaggcagaggttgcagtgagccgagatcatgccactgcactccagcctggcaatggaggaagactctgtcaaaaaaaaaaaaaaaaaaaaatcaaagctctatgataagaaatagagagcaaactcacaaactcacactcccagctgtgaccctgaccccattccttccctctgataacgatgatcatttttattagtttttggtttatcctcacgatgtttctttctgcaaatatgagcaaatacatatacaaatcatatttttctctctcttttgcacaaaaggtgcacactatgtgggttgcttttttgcccaccagtagatcctggaaagctctcctcttcagtacacagagggtgttctctttcctctttacggctgcaagtgtctccccatgcagatgtactgcaggctgtgcagcccaccattgctgatggatgtttgggtcatttccagcatattgtctcgacagatactacgcaatgaatactcttatgcatatgttactttgcacgtatctaagcagaatattttaatgcaattgagacacaatgtgttgtgtttttttccagtgaaactgttgcaagctttgccattgaacgtctcagggccccaagctttttccatgtaacttccctccctccccaaaatgtgtaggaaaggcttgagcgaagcttttctgataatacagcatcactgcagaaccgtagctctagcgtttatcagccagggtcctggtgcaccagaagggcaccaaagaattgtgtgaatgcaggggccaagtgcagcagtgatgggaactgcagacctggcatggttctgtccggggctgcggttacaagtcaccacaaaccaggtgggttacaacaatagaactgtcttctgttccagctctgcgagtcagagacataaaatcaaggtgccggcaggaacggtctcgcttaggaggttgtagaggagaacccactgcctgcctctctcccgtttcttggcctgtagctgcctcactccagactgcacctctgtcgccacatggctcctccctgcacctgtgtgtctcaaatatccctctccctttctctctgttttgaaattttggagagccttgctctgtcacccaggctagagtgcaatggtgtgatcacagtgcaccacagcctcaaactcctgggctcaagcgatcctcccaccttagcgtcctgaagccctgggattacaggcgtgcatgaccgcacccagccctgcctgtctgttatgagggcctctgtctttaacttacatgtacaaagacgctatttccaaataagggctcattcacaggtcccaggtggacatgtcttttgggggccaccatctgaccctccgcaactggtgaggccccgctggccaacaacgtcaggagccttccccacactaggctcaaaggaggaaggtagggacggggttaccaggccaggaagaggggccgcccagcgggggctgcagcccccccaggaggagcccagcttctgcctcagcccagcatgggacaggggctgggaggcctagacctcctccctctctcctcccatcggccaaacccagcaggaagccagaagataagggtgcctgggagatgggaccctttggggcctcctggctaaagagcagagcagagaagagctggacatggctcagggaggggtggagaccaaccttcccatgtgtccccccatgcccactcccacgggagctgtgccaggtcactcccagccctgatctgttgttccaggcagtcgactacgagctcaacagagctttcatgctgacagtgatggtgtccaaccaggcgcccctggccagcggaatccagatgtccttccagtccacggcaggggtgaccatctccatcatggacatcaacgaggctccctacttcccctcaaaccacaagctgatccgcctggaggagggcgtgccccccggcaccgtgctgaccacgttttcagctgtggaccctgaccggttcatgcagcaggctgtgaggtgggtgcacaggacatgcctcgtccctgcctgcagcttcccaggttccatacagaagggtccagaaataccccatgaaacccacagcccagaattcccccagatgggtggtcgggggcatctccaacctaaggcgtccttccaggagggagccgcagccccttagtcccagatagccagatgcagcccctgatcaatcgtgagtgttgtgaccggtgcttactcattcagcactgtctagacacaggccggcccgatcctggccacactctcatagctataagactcagcaacctcctgccctctctgctcctcagcgtccttgtccgttcgatggggacaatgagggcgtctgcccacagggtccttgtgagttgagaccacccactactggatgagcttggtgcccgtagccactgcgtggcctgtcctgttgtggggccgggggggagggtgccagtccaacgtggaggggaagccctagaggaggacaaggcctggggggctccaaggagacagagacactggcccaggcccaggccctggaggtgtggccaaggaggcctgggatccagggcagccccgcccacccccagccttacctccccctgcacttgtggtctccgcagatactcaaagctgtcagacccagcgagctggctgcacatcaatgccaccaacggccagatcaccacggcggcagtgctggaccgtgagtccctctacaccaaaaacaacgtctacgaggccaccttcctggcagctgacaatggtgcggcccaccccagggaggcagccgtctcggtggccttcccgtgtcctgggttctgtgggcgagggagggtgctggccagggagaccccgagaggccagcaggcatccagagggtcacccagaggggctgagggggcatctgtgcagacaccggtgatcagggctgcgtcatctcagggcccccaggccatgctccccctccacccactcccatgtcagtcattcattctgccccctccccagcattcacttgcttgttcgaaggtgtgcctggtctttccccccaacgtcactcacccacagcctccaggggcatcagggcactggtcatcccaggcttggctttgctgccctctgcaacctgaaatgcatctcagttttgctgcctgtaaactgaggcactggaatcaggtccacagttttcaaatgctttcagccggcagcccttgccacagaccccatcctgcggggaaggcccagccccactggtcagcagccccgggggtgccgccctcgtgtctctgaccacccacggcacagacccctgtggcccttagtcacagcaggaggcatgagaccctccagggccctgggagtgcagagggcggtggcaaggtcccggggcaggcggcacagcagacgacctcaggagcctggacgggagggcgaggatgggctgggcagagacggcaggaagaaggtttgagagcacgtggggctttctgagggacatgggccagcatctcaagaagcagccaccccttcctggacctgcagtaaccctgcgaactggccgagccccccacgggtcgcacgctctcagaggcatggaggcagggcgggtgggagcagggattctggaaccgaagatcagtccagtaccaccgcttaccagtgggaaaagacgtgaccgctctgtgcctcagtttcctcctctgccaagtcgggggagtcttagtacccctgagaatcaaacgagtcggagtcaccggaacactgaggaagggcctggctcagagcagcatgggctcctgtttgctgcggccgtgatgactgcccgggctgctgtttgccgagtaccggccgagtgcctgccgctgctcatcagtgggtggaacacagtgacgccctgctgtggcttggctgacagcccgagtgtgtcggctggaacctgggtcagtgaatactgatggaggaaactgcagcacaattgaggctttttttctctcacgtcaaagaaggctggaggcaggcagcccagggggagatccgagacctggggcatcctgactgtgccacggcatggcccagaatggctgctggagctccagccgtcacagccatgttctggcaaacagaaggccttgcagggagggcacgggcacacgtctgctactaaggactttcagaaagccccacgcaagtcctccacccacagctcacaaagcccagaacttactgatgcagccacccccagctgcaaggggcgctgggaaatggggtcttctagatggacagtgatgatcccagacaaaatgtaggactccgattattttattaaaaggaaacagaaaatggatattggggatgactcagcagcgtctgccccaaggagaccggagagaaaccagccacgcagatgattcaggcagcaagaagagctgggagaaaacaaaacaggcggctgggaggcagtgaccaggggctccgctctgaggagctgcccttgggaccaagagctgtggaaccagaggagcaagcacgggaaggagggtcacagagttaggaaacggtgtgtgcaaaggccctgaggcggggctgtgtctggtccgctcttggaacggctgtgcgtgaagcctcatgaacaagggtagccattgtgcaaacgctcgtcccatagcaggtgaagacaggacgtggacacccccctgccagcctcccccagccagcgctgcctcccctgccagggtccacagagcccgggctgtgtagctgtgcagctgtgcagctgcctgtgagcccagggctctggtcaggggaagcgtctccccttgagggtcccctgccgcagctcaagccctgaggttaaattagaaagtgattgtgagcccgggccaggccccgtggctcacacctgtaatcccaacactttgggaggccgaggcaggtggatcatgaggtcaggagttcaagaccagcctggccaacatggtgaaaccccgtctttactaaaaaaatacaaaaattagctaggcatggtggtgcacgcctgtaatcccagctattcgggaggctgaggcaggagaatcacttgaacctgggaggcagaggttgcagtgagccaagatcgccccattgaactcaagcctgggcaatagagtgagactccatctcaaaaaagaaaaaaaagaaagaaagtgattgtgaggccgcagctggaacatcggagcgtccatcgcacgtggcagacgccgtgtgagggagccggggtgcacaggctggagcaggagccccccggttaacagaacctgtctgtgcttctccgatcacgtgccgtgccatcagctacatctcaaagcagttttcaaaggtagcgccgcgctgcgtcaccttaaatgtgttttgacgcagcttccggaagattaaagagacatccgtgggatacatttttacatggttcgcctgcctcagtcaaaacacgtggttgttaacgtcaggtcaggagctgccatcaggagcaaagctacagtcagaacatgccgccaccaccgccgcctccaagcctggagagcagacagggcatctctctgtccccagattccagccacctggcctgcatcctgggctgaggcaaggactgagcatgtgaagaccccagggacagggatggcccctgaggagctctgggggctcggcagagcacctccgttcatgctgaagccagaggtcatcgggtcctccaaggagacctcctgccgggccaggagggagcttccatcaaagctcatctggagcggccgcgcctgcttttctcacagacacttccaaaagcagcagttcttccacgcgatcatgcgtctgggctcagggcttccagcaccctggggctctgctgggcagggccagcaaaactcagggaggcaaggaaaggttttgccctaagaagtcccagatgggggcaagatgtggtgggcggatcccagccctcaggggccagtgcagagcccagcacccgcagaacccctccctggctccccagtgggagtgagtccccggtgcgtggctgtgacctccgtggctgtgagtttccacgtgaatgccacaccccgctgtgtgcgtgtgtgcaggtgtgggtgtggccgtgtgctctgccgtgtctgttgaggtgccgtgcgcagtggctgtgtgcgtgtgtgcagctgcgggtgtgggtgtggccgtgtgctttgccgtgtctgttgaggtgccgtacgcagtggtgtggctgcccatggcgtgtggcagggtgtcggtcaggagccatggctggactgtgggtcagtccctgtgcagctgtgttgggagatggccggccgtgtccggctgggggtctgcacatgtgtccctgtgtatgttgcacgtggttgtttgtgtgcgtgtcctgtgtggagctgtgggttggtcatggagtaccaggagtggcccgtgtggtgacctgtgtctgttccacagggatacccccggccagcggcaccgggaccctccagatctatctcattgacatcaacgacaacgcccctgagctgctgcccaaggaggcgcagatctgcgagaagcccaacctgaacgccatcaacatcacggcggccgacgctgacgtcgaccccaacatcggcccctacgtcttcgagctgccctttgtcccggcggccgtgcggaagaactggaccatcacccgcctgaacggtgagcccgccttaggccacggggagggtcagactagcctggggtgcaggcccctgggagacccagctggccttggaagagtgggcaccagaggtgggtgacagtcctccaacaggactgtcccaccaaggctggggacactggccacgcttcagctgctcagcctccttcacctggccttgaggaggccaccaagtcattcccaatttcttgctgctttaatgaggccagccgtgaacatccttgcagctctgcccatgtacatccatgacaacttcctgtgccggttgtcagttgactggaccctgactgatatgtttccttagaatacttccctggatgcagatctgtggtataaaaggatatcaaaattctcaagttttggcagtactgtgaaaatgtgctctaaacatgtctacttccatcgggagagtgcctgtttgtttcctcaaaccccaccaacactgaacattattgttttaaaataatattttattctgccacctttaggccaaagtcattatttccatttgtatatcctgattaccagtggaaattttttatatatatttattggccatttttgtttcttctgtgaattgtctgttcaatgactttgcctatgttttctttggggagtttctttttattgatttggtaaaactctttatatattcaggaaattatttcttcatcctacatgttgcaattgctttttggttgtgtctccaatgtctttttttttttgagactgttgcccaggcagaagtgcagtggcacaatctcagctctgcaactccacctcccaggttcaagcaattctcccacctcaggctcccaagtagctgagatcacaggcttgcaccacacgcccggctaatttttgtattttttactagagacagggttttgccatgttggccaggctggtcgtgaactcctgacttcaagtgatctgcccacctcagcctcccaaagtgctgggattacaagcgtgagccaccacacccaacctccaatgtcttttaacttaatgatgtagcacaggtgtatgtatgtatgtgtggtaaccaggcagccatttcagatttccatgccatcggacttttagtcttttcctttggacgtcttgcttggaagcgagggccgggctctggttgaatgtttactgttgctttgcaccaggtgactatgcccaactcagcttgcgcatcctgtacctggaggccgggatgtatgacgtccccatcatcgtcacagactctggaaaccctcccctgtccaacacgtccatcatcaaagtcaaggtgtgcccatgtgatgacaacggggactgcaccaccattggcgcagtggcagcggctggtctgggcaccggtgccatcgtggccatcctcatctgcatcctcatcctgctgagtgagtgtggctgagcaccagggtgggcaggggcattgtgggtatgagtgccctgtcccaggcatggtgggcagaggggggcctggatttgcccctcagccctcatctctcagcctcatctgtcaggagcctttcagaaatgcagctgaactggtccatatgacaatgggaaattggagcctcccgttactctcaagtctggaggtgcaggccggcccaggtgtctcccatggcctggcccctttccacggctccactctgcctcccagagcccctgtgtcctgaagctgttgccctccaggacctgtgacgcctgtgggcagctcccaggtggacttagcagagggaaggtcagccctgcctgttagcgtccccatccaaagtcccaggacactctctgattggactggcttgggtcacatgcacaccttggagccaatcaccagccaagcaatggagtgttctcactggctctgcccagatcacatgctctagtagtttcttgagtttcccacaaccactgtgggttcccaacaggtctgagggctggcgggggggcggtgccaggggaggtgcttgaaaatgaccccagaggtccctcttcccatcatccctcatggacagtcaccgtggtctgtgataccccagggatcccagtgggaggcagggcggggaagggttgggctaccacctccccagttcacacccaaaccacagggtcccccaccacgtccagaacaggcggcaggcccctcctgcagacctggcctgcggctgacttgagaccccagggaccaacctgagccctgtccaaaggatgtctgagttatgaggactctgcttttttccccatttccagacctatcaccccttgaaaagccggttttcatttctgaggcttgttttgaaagccgttcagtgtcgtgggcttctttgtatgatcaggagtggaaagagccccacagaggttgggaggtgtctctgtagcaaaggtggaggcattctcaccgatgtcccctgctctggaaacaccgggggccaggccccagccagagcaccctctgtgggcagggctgtgagacccaattcagctgagtgcctggcccgtgcaggagacctgggccactctcgagggcagccgcagtggagggcatccgcagtggggccggggccacggtcaacagcagatccgcctgctgcccggcttctgcccagtcgtgggcacctcagccctggtggggtgcatggggggcacccggagtggcctcccctcctccacactcctcctctcaaccctcgctcatcttgtctgcctggatgagcctgggatgccagctgtgagagtggagctgacctcttcaaaggttcttggccttgtggcttccgtcgagccaagactaggcccgggctccaggctccaggttctcacggagctgcacctgcagtgcgtggctcctccctccgcctgcacttccctctccacgatctgggccaggtcaggaagcgtcccccggctgtcacctcaccctctgcaggcagggcgatgccgccaatacccacagagctcctcccaagcctccactccgcttcggaatcctcctcacgacatcaggcagccacagccaattaatcgggttggcaaaaaacagccctcctgactggggggtcgccgcccctctcgcctccgggctcaccctctgcggtacataagagtgcacctgtgattctgggcctcagtcgttacatctgtgacatgggaggtgacgggaggcttcaggaggatgcagtggagtggtttgtgcaggcatttactgggggcgtgggctgcattacctgctcctggagctttgcagatgggtgcgccaggcttttcctgcagcagaggcagccaggggtccagagtgagcaaggctgtttaggggagccagggctggacacggacctcggaaggcaggaagaatccagttcagcttgggggagagggtccctccatccaccccacaaggggactttacctctcttcaatttccacatgcacctgaacttctgagcctgtaccccaattcctttgagtggtggaaagagcccctctgagtgaccccctcggtactgggtggggctgcccttctgtccagcgacgccctggactgaccccaccccaggggccctcaggaagcaggatccctggatcccctctctgggcccctatcctcccagggcagagcctctttcaatatgggggagtccatctccctctctcagtgattcctaccaagacactgtgtgcctaaaacctcacttccacctcctctgacaaagccatctccctcctgctgctcagaagagggactcagaaagacttgtgggtgggcccctcagccccccatgtcctcccgtccccaggcggtgagaggcaccctgagctggctgccttctcaaaaggggagtgcaagaggagggcgagcttgtaaatcaatgactcaaaatgtagcccagtgcccaggcagtgagctggggagagggcctgagccagtgcggctgtgccttggaaactcatgcacacgcacacaggcatgcatgcacgcacagacacatgggcacacatgtactatggacatgaacacatgcactcacgccccatgagcatacacagacacacgaagtacacatggacacatgcacacacagacctgtgcaggcttgtgtgtgcatctacacacatgaacacacgagcacacacacagatctacacgctcacacccaggcacacgcatgtgcaagccttcatacacacgtcctcctgcagatacacgtatgcatgcttacacagacgcatgaagcacctacatccacgactcctgcggatacacgtatgcatgcttacacagacatgcatgaagcacctacatccacgaatgcacacgcacgtgggccgcacatgtgcacagatgtgtccttgcacatccaggcctgcatgtgcagagacatgcgcgtgtgcagtacaggtgtgcatgcacacatgggcacagtcatgcttgtgtgccacctgcatgtacatgcccacatagacacatggcaaacacagaggcacacatgcgcacacccgcagcacaccctgctcacgggcagccctcccccacagccatggtcctgctgtttgtcatgtggatgaagcggcgagagaaggagcgccacacgaagcagctgctcattgaccccgaggacgacgtccgcgacaacatcctcaagtatgacgaggaaggcggtggcgaggaggaccaggtgagactgcggcccgcccccgcctccccacgcgaggccggctctcacgtgtactagtgtctcagcagggattgccctggggtttaacagtaagacatttcaaccttttcaccagtgaaggtgccaggcaggggcgcacggtttcctagcctgggctgagctgtgtacactgcacctgcatcccccacgggggatcctgggacccctcccatcctcgccttcttccctcccatcaccagccccagcccagtgctgccctgtgccctggaggggagggggctccgggttggccaagcacaccgatgcccactcgcggatgctgctgtgtgcagagggctgtcgactgaccaggggcagtgcaccaggcgcccgggagggtagactgtgagagctggtggttggaatctgagtctacccttggcctttcagggaatcggggcaagtcaagtccttaaacccgtctaaagctcagacccctccctgcccctcccacaacacgaccataacgaacgtgaggcatgtgccttgcggaggcccagctcctggccaccttccccgcccctcccgcaacacgaccataacgaatgtgaggcatgtgccttgcggaggcccagctcctggccccctgagcactcggggcacgtggttggtgagcagcgtggtggtgaggtcactcggggagagccccaggccatggaacacagccaagaacagcccctatccctgcccaagggattggggtaaagggcaaggaggtggggcattgtggaggggcacagcaggggacagcatggttctgtgggatgcttggagaccaggccacagggcagcaggtgcatctgtggcccaggtgacagaaaaggatgcagggtggaaggggggctggcggattcttctgatgcccctgactcctcccggctccctcccccaggactacgacctcagccagctgcagcagccggaagccatggggcacgtgccaagcaaagcccctggcgtgcgtcgcgtggatgagcggccggtgggcgctgagccccagtacccgatcaggcccatggtgccgcacccaggcgacatcggtgacttcatcaatgaggtgtgtgcctctcggcagtggggggcccgggcaaggtgtctcctctaaaaattaaattctggtaacacacacagaagccatctccacagtgccggcggctgccgtgggtgggaggcagctcagacccgggttccaggccctgctctgcccctccagcggggtggcctgggcaaatcacctccctcagcaggccctctttccaaggatgaggattcctccctgtaggctaggcgaaggatcaacacacagggccgggtgcacagcaggggcttcgtaagaattcgggtttgcagcagaggcgccagtagcaagcacaggcctcaggaggagaatcagcggggcgacggcggggaaggcgcacttggtgctatgagccctccaagtattaaccttacacagagcccactgccgctgtgaatggccttcccgggctcggctcacccagatgctcagagaggcagaggcccaagcctggtctcagggcccaggccaacttgccccccctccccaccccaccccacaccccaaacatcaggacacagcaggtgggagccacacagaggtggctgccttccagggctgccgcctgaccacctgcccaacctgacacttgagggttggaggggacttgacttgaccaacaagcagcacaccccagccttccatcttcccctttgcaagaaacatttgaaacatcgcttacaatgtcgccagggcaacactcagtttccacttccaacgcgcagctccctgtcttcgttcccgtcttccatcttcctttgcggtgaagagaacagaggagcaagtcaaacagggcagactcctcccagggagcgtcctccgggcagtgactctgaggctccagactggcctcgcctgtggctctgcagggatcacggtgtcctccgtgctgcttctagtcggcgtgagcccctgtggtttcatcacctgctcgccgatgcccactgcattttaaaggaggtttagcaacacttagacctcagcctaggtcagaatctcactttaaaggaattgatttaaacagaagataacccaggcagtgattcaacagaaagacagaaaggtttccccaaagcagatggtgttctgggccacagatgaaattcctacaactgcccacgcagaagctgctctgacaacatgacgcttaccgtctatgacataataaaaacgtaaagatccccaaacgtttgccctgcccagtctataattaatttagagcccactgtttgttagccaggcgcggtggctcaggcctgtcatcccagcactttgggaggccaaggcaggtggatcacctgaggtcaggagttcaagaccagactggccaacatggtgaaaccccgtctctattaaaaatacaaaaattagccggcgtggtggcctgtaatcccaacactttgggaggccatggcaggtggatcacctgaggtcaggagttcaagaccagactggccaacatggtgagacccccgtctctactaaaaatacaaaaattagctgggcatggtggcgggcacctgtaatcccactacttgggaggctgagacaggagaatcgcttgaacgtgggaggcagaggttacagtgagccaaggtcgcaccactgtactccagcctgcaagacagagcaaaactccatttcagaaaaatctaaaaataaataaataaagcccactgttagataggtcttaggagaaattaaaaatgaaaacaacaaaccagtccatactgaatgacactgagtaccctctcccagggtcacaggaggagcaggtgctggcatggaggtggcacccgcgggcactgaggagaggacggggctccagcaacacccacggcactgccaaagcttgtccgtgggagtgccacactcataactgccaggttctgacttctgtccaccctaggtccactttccctccagacaatggtcagctagactggagaaccatctgcctgcccccttagggaggagctgagcttcagccacatggcccagccctcacctcccccacaccaccccttgccctctcccacacccccctgcccttcccctataaaccctcacagccccccaccctctcccacacctccaccttcccccacaccccttccccacaccccctccccttcccccacaccccctcccccacaccccctcccccctctcccacacccccccccccatctgcccttgggttgggaggagctgaactccagccacgggccctgcccaaccctccgcctcccctgcccacagactgctgctggatttgagtttgccccttcaacactcccacgctccatcttcacaaatgcccttttctactcggaaatgcccttcagttaaatgcagagagcccttattggacacctactttatgcaacgtcctacctccctacctcttcttctgggcctcgctttccgttccatctgatcccggggctgagacaacgcgtcctgcaccctaactctgtgtctgtgacccccagggactccgcgctgctgacaacgaccccacggcacccccctatgactccctgctggtcttcgactacgaggggagcggctccaccgcaggctccgtcagctccctgaactcatccagttccggggaccaagactacgattacctcaacgactgggggcccagattcaagaagctggcggacatgtatggaggtggtgaagaggattgactgacctcgcatcttcggaccgaagtgagagccgtgctcggacgccggaggagcaggactgagcagaggcggccggtcttcccgactccctgcggctgtgtccttagtgctgttaggaggccccccaatccccacgttgagctgtctagcatgagcacccacccccacagcgccctgcacccggccgctgcccagcaccgcgctggctggcactgaaggacagcaagaggcactctgtcttcacttgaatttcctagaacagaagcactgtttttaaaaaaaaaaaaaaaaaaagaagaaagaaagaaaaaaaaaaaaaaaagaaagtgccttttggtacatgtatcagattccctcaaactcaggagtgtctaaagcagacagaccgtccccaccttcccatcccgagcggcctccaaccccagctagtcccagctctgaaggcatcattcagaaatgggggagactgtgtctgtctttcttactttttttttggtcttttattaagaaaaagaaagtgggtgacttgtttgaaaacagagtggggttcaaatcccagcagcctttgctgtacacagctgggggtctcttgagcctcttgggagtcaaggccagctgggaggcttagcccttcagccccagcagaaggccctggggctggtggggctcagaatacccctaccttgtggctgctccccacccctcccggatgctgtgaggagctcaggcaggggcctggaggggaacaggggtcatcctgaaggggctccacccccagtcaacccaggcctccctcagggacacctgtcaccctgagtgccaccaggtcccctctgcctttggtccagaagagtgagttgtccaaaccagccagcatctggctccagccctccaaccctggcgaccagaccccatggggtgccatcaacggccccgcgacaggcatcaattcaaaccccaggacactctcgacagctccaaccatccggagggctgtgcagatggcaggaaccaaggaccctccctggcagctgaagagggcagttacggttgggcgtggtgaccagaacacacccagcagcctgcgaagcctccccgtccccagcctgtgctcctgattcccgccagacgcttgtgagcctgtgtgggtggcaggaggccccgtcttgccgtgcctacctgtcgcacagatgcctctgcacgctgcagacggtgcctctcctctcctatggaccctcgtcgggggcaggcagcggccgggtccaaacttgctgctgtcctcgaggctggcactgctatctccagggctgggttgactcaagccagacagggggaaggaattggttctgcaggacagtgagagggtctgtgtcccggcacccctgggacagcgctcggctgcctgtgctcactgcatgagaaaactcagagggtgcattctccctctggcatggctgtgtctgggcgccttgggctgcggcagggggcaggccccacgtggggaagcctcgtgcttggtcagctttctgtctctcccaggccagtgacaactggcttcccgaggaaggaggtgaggtaccagggaccctgggcaggacctggtgtcgggcagggcggtgccagcactggggaaggacagggagccctcccggagccccaccctgcacctgccactggggtcagggagtgtctcggggtgcctttgggggcagcatgagctccaccaggggccccggcccccacctcagcctatggcccttccccatggctaaggtcatgccttttctgaacagctttggccttgagtgcacacatctgtgccaggctcacggcatgttcccgttggatgtcagggtccttgtccaaaccaaactcacagctgcccctgtgcagccttcagagttgagctggggtctcagtctccaacctgtcctttctgaccctcccatggctgcccagggagggcggggttcactgtgccacgtgctgggtgcccccctctgcagacagccagtccaggagatggaccaacagaggtcaaggggcagctggccaggccgcaccggggtccccgagttctgagctgtgctatgcaaacaagaatgctcctgtgtgggggggcatggccgttggaggtatagctgggcgggtagtggaaggactggaaatctctgttgttgtttggggaagtccatgcttcagtccttcggagtatgcgtggattgttcgaagtgtgactatggcccgggagccagggcagcatgaactcctttctctgaaatttcgaggcctccttgggttccctgaactccgggctgatgttcccaggacccagcaccaggagaccccagtcccgccagcagccgccgctacccaggagggctgggcgacattggccgcctcccactagctccccctcctcgcccacagcctcttgtcactgccaagcccccgttccttttgcccaaatcacgcaggcggaagctgcagtgccagctggagggatgttcatagggcttcctgtgcccatccctgctccaaacagctggacagcttcccctctacccccaccctggtgagcccctgggggccagagaaagatggggttcctgcaccttcccagctccacctctgaacttgagttagcgttagctaagcatacaatcagtgtcgaacgtctctcttccttaagcttgtagatacgactgcctataatcaggggactcccactggaggccgggaggccaatgctggccaggtgcgagggcatggtttggttcctttagggaatttttgttttgcaaacaggagaaacctgtgctgcaggttggagtggcaggaacgactggccttggtcagcaggcagcccccagcctagggccacagtcctcttcagggcctgggcagccccaatttctggcccagcaggtttctctttgtagtgtctttcagcacatccaaaatgctaggcctcctgccaccaacgtgtcagagcaatgtccaactgtcaggctctcagagatgcctcagtttccctagcatgagcaccagccgacacacacagtccactgagatgataattctgttctctccaaagcaaaaagctgggcgaggggtagtctcaatttctgtcagtgctcaaaggaataacaccaaaagaatcaacacagaatctcccagacacacgtgacccagctcgtggcgccgtgggtccgtaggagggacagtacctcacaacaggcccagcgggggaccacctctctgtacaattggaatgcgttttacttttcttttctctccttttttcattccgattttttttgcatgtttctttttgaaatgggcaaaatgtgtagcagcctgcatgagcacagttgttttggggaaagatactggagtatgatgtactcacacctgcaaatctgagcatcgcgaggttaaacgttccacctttttttgtaatcgtcaacagcacaactattttgtattgttgtttgtatcattttgtaccaaaaaaaaaaaggaaaaaaaaagggaagagagttgatgttttcagtgtgtttccagtgccagacagtcttggtcctgaactcagtagacccttgcggagcggttgtgcgcgggcaggcggggcgcgctgctccagagaatgaataaagtcccccttttccgtagtcggcatcgtcctggcttgattttcttccaagcattcgagaaacagatggtgctccgggacagcaggtgggtgcacacgggggaggtggcggccaccatgagctccatgcatgctgaacacacttcttgaacacctgtgcagctcaaggcgctgtcctaggctgcgggaaaacagaaagaacaaagccaggcccgctcctcacacctgtgggcccacatgccatctgtctcaatgttttaaagggtttagaaggtatccatgaaactaacaagcaaaatcacattcccctcctaccttggcatatacacctcccggactccatggaatgcccgggccaatttggaattatcagactccttggagtgtggtgccaaaagtggcagcaaggaaggagctggcctgggcctgtggctcttcccacctccgtctcttcccacctccggctttgcccagtgccccagggggcctgcgtgtaggcatttggatgccccaggcttcacctaagcccccaacaaacagtatcccttgggcctcgggacaggtccacctggtgaaaatgcaggagaggcctaagcagaccagagagggggctcaaggcactttgtgaggagtttcagggtcctggtgcccagaggtgtctggaggggcgagcacatggcccccagccctgtagactcctccccctgtggtgggggcacagtcaaatgggctgaagtgccagcaagcggacacgtgcacacatgtatatgcttgcatacacatgagcacacatgcatacccacgtgtatatgcacatgcatgcaatgcacgtgtgcacacacacacattcgttcacatacttgcaaacataggcagcacatgcactgagacaggcctctggccaccgacatgtttggatgcaaaccctccgcagccacagccgacatcagcagataaaaccaccaagccccggagccccactcacggatgccaggtgttgcatgcatcactccctccccacttcatttccccagtctcaggtggaggctctcctgcagtggtgacaccagctgggcctctgaaggtgcctctcccaccctctgccctccgtgcctcctgtcctctccacgcttcctgcttccctctttcctgtcactgccttatcctaggcggggggcatgaggcggctcaagtccctgggccgggcctcctgggatggccaggcaggaggctggtcaccactgcagccagaggtgccctgctggaggcctgggtgccaggggacggtggcacaccatctcagtggccccgcagggtcggcacaggccatgcagcagtgctgtacccctcagtggggctcaccttggcagtgagctgggccttctgcaggcatgtggtccagcattccccaggcccttccagctgaggccatcaccgctggtccccaaagggcagctctgggggccatgttcaggcctagtcctctgtaggggaggggacgtgagctctggaggcttccccagcgcaatgccctgtggaccaggctcctacacagaggctcacgggcactccatgcccatccaccgtgcccagggagccccctcggatggagaggacaggcacagacaatgccacctttcccaaggccttactctgggtcccacagaacctgccgtggaaaggctatggtcacccccactttacagatgaggaaactgaggctcagagaggggcagtcgcccactgcaagcggggtttgaactcaggcctccctgtgtccctgggggcctcccaggacacagaaccagcagaatagcccaggcatctccctcaccccacagagctctggcctcaaagtcactggggggctccttagagacatagacttgactgccccagctctccgacgcctgaagccaggcccagcccagcccaccctcctcagcagggaagatgctctgcgaagccctccactgcctcccctgtaaaaacaagggtggtgctgggggttgggggtgacactcagcataaccctgtaccaggcacgggaccctgcaacaaacatgtcccctcctcagttctgcctccatatggtggggggaggggctccagacaggtcaacacatgggggagggccaggaagggtgaccaaagctgctggcgaccaaagctgctggcagggacggcctgggagaggcgatggagacagggggctggaggagcaagggctgaggtacgggggaagagacccagataccggacaggcttctggtccggcacgcagccaccatgagtcccctctcccctaggagaggggacctcaggtgcctccctctgggcagcccagctcaggagcatccaaggtcaggggagcagtcccgctccgtctcaccagcaatgaggagcactgcgactgtctgcaccatggccgccccttctcaccgaccacgaggagcactgcgaccgtctgcaccgtggccgccccctctcaccgaccacgaggagcactgcgaccgtctgcaccgtggccgccccctctcaccgacgacgaggagcactgcgaccgtctgcaccgtggccgccccctctcaccgacgacgaggagcactgcgaccgtctgcaccgtggccgccccctctcaccgacgacgaggagcactgcgaccgtctgcaccgtggccgccccctctcaccgaccacgaggagcactgcgaccgtctgcaccgtggccgccccctctcaccgacgacgaggagcactgcgaccgtcggcaccgtggccgccccctctcaccgacgacgaggagcactgcgaccgtctgcaccgtggccgccccctctcaccgacgacgaggagcactgcgaccctctgcaccgtggccgccccctctcaccgacgacgaggagcactgcgaccgtctgcaccgtggccgccccctctcaccgacgacgaggagcactgcgaccgtctgcaccgtggccgccccctctcaccgaccacgaggagcactgcgaccgtctgcaccgtggccgccccctctcaccgacgacgaggagcactgcgaccgtctgcaccgtggccgccccttctcaccgacgacgaggagcactgcgaccgtctgcaccgtggccgccccctctcaccgaccacgaggagcactgcgaccgtctgcaccgtggccgccccctctcaccgacgacgaggagcactgcgaccgtctgcaccgtggccgccccttctcaccgacaacgaggagcactgcgaccgtctgccccgtggccgccccttctcactgacgatgaggagcattgcgactgtatgcaccgtggccgccccttctcaccgacgacgaggagcactgcgaccgtctgcaccgtggccgccccttctcaccgacgacgaggagcactgcgaccgtctgcaccgtggccgccccttctcaccgacgacgaggagcactgcgaccgtctgcaccgtggccgccccttctcaccgacgacgaggagcactgcgaccgtctgcaccgtggccgccccttctcactgacgatgcaccgtggccgccccttctcaccgacgacgaggagcactgcgaccgtctgccccgtggccgccccttctcactgacgatgaggagcattgcgactgtatgcaccgtggccgccccctctcaccgacgacgaggagcactgcgaccgtctgcaccgtggccgccccttctcaccgacgacgaggagcactgcgaccgtctgcaccgtggccgccccttctcactgacgatgaggagcattgcgactgtatgcaccgtggccgccccttctcaccgacgacgaggagcactgcgaccgtctgcaccgtggccgccccttctcaccgacgacgaggagcactgcgaccgtctgcaccgtggccgccccttctcaccgacgacgaggagcactgcgaccgtctgcaccgtggccgccccttctcaccgacgacgaggagcactgcgaccgtctgcaccgtggccgccccttctcaccgacgacgaggagcactgcgaccgtctgcaccgtggccgccccttctcactgacgatgagcattgcgactgtatgcaccgtggccgccccttctcaccgacgacgaggagcactgcgaccgtctgcaccgtggccgccccctctcaccgacgacgaggagcactgcgaccgtctgcaccgtggccgccccttctcaccgacgacgaggagcactgcgaccatctgcaccgtggccgccccttctcactgacgatgaggagcactgcgactgtctgcaccgtggccgccccttctcaccgacgacgaggagcactgcgaccgtctgcaccgtggccgccccttctcactgacgatgaggagcattgcgactgtatgcaccgtggccgccccttctcaccaacgatgaggagcactgcgactgtctgcaccgtggccgccccttctcaccgacgatgaggagcattgcgactgtatgcaccgtggccgccccttctcaccgacgacgaggagcactgcgaccgtctgcaccgtggccgccccttctcaccaacgatgaggagcatcgcggctgtctgcaccatgggagccccttctcactgacaatgaggagcattcagagtgtctacaccgtggccacgccttctcaccgatgctgaggagcaccgagactgtctgcactgtggccgccccttctcaccgacgacgaggagcactgcgaccatctgcaccgtggccgccccctctcaccgacgacgaggagcactgcgactgtctgcaccgtggccgccccttctcactgacgatgaggagcactgcgactgtctgcaccgtggccgccctttctgactgatgataaggaacattgcgactgtctgcaccgtggctgccccttctcaccaacgctgaggagcactgcaaccatctgcaccgtggccgccccttctcaccgatgatgaggaacattgagactgtctgccccgtggctgccccttctcaccgatgctgaggagcactgtgactgtctgcaccatgggagccccttctcactgacaatgaggagcattcagagtgtctacaccgtggccgcgccttctcaccgatgctgaggagcaccgagactgtctgcaccgtggccgccccttctcaccgatgacgaggagcactgcgaccgtctgcaccgtggccgccccttctcaccgacgacgaagagcactgcgaccgtctgcaccatggccgccccttctcactgacgacgaggagcactgcgactgtctgcaccgtggccgccccttctcaccgacgacgaggagcactgcgactgtctgcaccgtggccgccccttctcaccgacgatgaggagcactgcgactgtctgcaccgtggccgccccttctcaccgacgatgagtagcactgcgactgtctggatcgtgggagccccttctcaccgacgatgaggagcactgcgaccgtctgcaccgtggccgccccttctcaccgacgacgaggagcactgcgactgtctgcaccgtggccgccccttctcactgacgacgaggagcactgcgactgtctgcaccgtggccgccccttctcaccaacgatgaggagcactgcgactgtctgcaccatggccgccccttctcaccgacgatgagttgcactgcgactgtctggatcgtgggagccccttctcaccgacgacgaggagcactgcgactgtctgcaccgtggccgccccctctcaccgacgacgaggagcactgcgaccatctgcaccgtggccgccccctctcaccgacgacgaggagcactgcgactgtctgcaccgtggccgccccttctcactgacgatgaggagcactgcgactgtctgcaccgtggccgccctttctgactgatgataaggaacattgcgactgtctgcaccgtggctgccccttctcaccaacgctgaggagcactgcaaccatctgcaccgtggccgccccttctcaccgatgatgaggagcattgcagctgtctgcaccgtgcccgccccgactgatgatgaggaacattgcgacggtctgcaccgtggccgccccttctcactgatgctgaggagcactacgaccgtctgcaccgtggccgccccttctcaccgatgaggagcactgcgactgtctgcaccgtggccgccccttctcaccaacgacgaggagcactgcgaccgtctgcaccgtggccgccccttctcaccgatgaggagcactgcgactgtctgcactgtggccgccccttctcactgacgatgaggagcactgcgactgtctgcaccgtggccgccccttctcaccaacgatgaggagcattcggactgtctgcaccgtggccgccccttctcaccgacgatgagtagcactgcgactgtctggatcgtgggagccccttctcaccgacgatgaggagcactgcgaccgtctgcaccgtggccgccccttctcaccgacgacgaggagcactgcgactgtctgcaccgtggccgccccttctcactgacgacgaggagcactgcgactgtctgcaccgtggccgccccttctcaccgacggcgaggagcactgcgactgtctgcaccgtggccgccccttctcactgacgacgaggagcactgcgactgtctgcaccgtggccgccccttctcaccaacgatgaggagcactgcgactgtctgcaccatggccgccccttctcaccgacgatgagtagcactgcgactgtctggatcgtgggagccccttctcaccgacgacgaggagcactgcgactgtctgcaccgtggccgccccttctcactgacgacgaggagcactgcgactgtctgcaccatggccgccccttctcaccgacgacgaggagcactgcgaccgtctgcaccgtggccaccccttctcaccgacgatgaggagcaccgagactgtctgcaccgtggccgccccttctcaccgatgacgaggagcactgcgactgtctgcaccctggctgccccttctcaccgatgctgaggagcactgagactgactgcactgtggccgccccttctcaccaacgatgaggagcattgcagctgtctggaccatgggagccccttctcaccgacgacgaggagcactgcgactgtctgcaccgtggccgccccgactgatgatgaggaacattgcgaccgtctgcaccgtggccgccccttctcactgatgctgaggagcactacgaccgtctgcaccatggccgccccttctcaccgatgaggagcactgcgactgtctgcaccgtggccgccccttctcaccaaagacgaggagcatcgcggctgtctgcaccatggccgccccttctccccaacgatgaggaacattgtgactgtctgcaccgtggccgccccttctcaccaacgatgaggagcactgcgactgtctgcaccgtggccgccccttctcactgacgatgaggagcactgcgaccgtctgcaccgtggccgccccttctcaccaacgatgaggagcactgcgactgtctgcaccgtggccgccccttctcaccaacgacgaggagcatcgcggctgtctgcaccatggccgccccttctccccaacgatgaggaacattgtgactgtctgcaccatggccgccccttctcaccaacgatgaggagcattgtgactgactgcaccgtggccaccccttctcaccaacgatgaggagcactgcgactgtctgcaccatggccgccccttctccccaacgatgaggaacattgtgactgtctgcaccgtggccgccccttctcaccgatgctgaggagcactgtgactgtctgcaccgtggccgccccttctcaccaacgatgaggagcactgcgactgtctgcaccgtggccgccccttctcaccaacgacgaagagcatcgcggctgtctgcaccatggccgccccttctccccaacgatgaggaacattgtgactgtctgcaccgtggccgccccttctcatcaacgatgaggagcatcgcggctgtctgcaccatgggagccccttctcactgacaatgaggagcattcagactgtctacaccgtggccgcgccttctcaccaatgctgaggagcaccgatactgtctgcaccgtggccgccccttctcaccgacgacgaggagcactgcgactgtctgtactgtggcctccctgtctcactgacgatgaggagcactgtgactctctgcaccgtgggagctgagggtttgggttccaggactgagaagcatgggggacccttgctcagcggctgcccagggccctgatgaccacctcctgaaagacagcacctgcccagcctccagaagctctggggtattaactacccattaactacactaaccaggtgggaaggtagtccactaactacactaaccagcccagaaaaacaacctattaactatactaactaccctggaaaccagccctaatcaacactaagccagtgggaaactagtccattaactatactaaccagcccaggaaaacaacccattaagtacactaatcagcccattatcaaccagcccattatcaacactaactatgtgagaagctagtccattaactacactaaccagcccagaaaagcaagccattaactacactaaccgggtgggaactagtccattaactacactaaccagcccaggaagccggcctattatccatactaaccagcccaggaggccaactcactatgtccagtaaccagctgtctcatgtgtggtgctgtaaccacctattgccgggactgggtacttgatcacgatggacgggaacatgggtcaggtctggtggccgggagtccgggatccaggcaccacagggttggtgctgggtgagggcctgccccacacagatggtgccatccaggtgtcctcacatggtggaaggtgaggggcagaaaggcccagctctctacctcctgccctttgataagatgccatcctggtcccaggggctcccacctcgtgcatgacattggtgctctgataaaagaggctcccccttcgccttctgctcttgtccatgtgagaacacagcacccgcgtccctggaggacgcagcaacaggacacctccaggacgcagagagcactgtatcaggaggctgtggtactgggtgggggaagggtccctccagagcatattgagtttggacgtgaacttgagctgcattcccaactctaggggaacgctgagtctcccaacacacctgagacaaagtccacagtcctgggcctgacctcggaggccctcagtggtcaggacccgccttccctgtgggcctctggagggcacaagcatcagctcccagcgcctgcctggctatgatgaaggggacccagccgggacagcctccatcccaaaccagccaggccccatgtagggtcagtgcagcggtgtctgtgcattgagagactgcccgtgtgtggctgggccaggccactcactgcccatcactgcagacaactatccaggaccccccaggctgccccaataccccagttgcccaggctgagcctcccagccatcccacccatctgcacccgctctggcacacggctgtaaggtgggtctgccatgggcgccgcccaggaaggacattctcctgccaagtcccagccaagctgggggtcgtgggctcacagccccatgatctgcccccctgctctgcctgcctctcacaagccaatgtgcccctctgatcaccttggcgccctggcctcgcctccccactatagaatcccagccctccaggccatgagtccaggcacaaacgggttctcccacaccagactctgggtcctcaaagctctacgactggcccagtcccctgaccccacctgccctgagagcctgagtccacactggtagtggctcaagagtggagcccctgcacagtgtcagtgccagccaccctggacctgtggaggctgagctcaaaggctgaggaaactgagctcgaagaagcaggcagccctccggcccctgctgggcagcagcagtctgacctgagccccacgctggtgcccaacccagcagcctccacctccgcctcaggagccagtcagtcccagctccccgaagggcaggccacagggctgggcccagtggtgaccccttccctcccccagccctgggccctccctcccaccctctccccttccccagccctgcaaccgcccctccacagccctgggccctccctcccacactctccccttccacagccctgggcccctccttcccaccctccctcccaccagccctgggcctccccctaccgtcctctcccctcccctagccctgggcacctccctcccaccctctccccttccccagccctggcccctctgtcccattctctcacctcccttagccctgggactccctcccagccctgggcccctcttcccaccctctcccctcccccagccctgggccccctcccaccctctcccctcccccagccctgggcacccccccaccttccttttcctggggcacaattcacatgtacactgacttgcataacaaaaaaccactcacggccgggcgcggtggctcacgcctgtaatcccagcactttgggaggccgaggcgggcggatcacgaggtcaggagatcgagaccatcccggctaaaacggtgaaaccccgtctctactaaaaatacaaaaaattagccgggcgtagtggcgggcgcctgtagtcccagctacttgggaggctgaggcaggagaatggcgtgaacccgggaggcggagcttgcagtgagccgaggtcccgccactgcactccagcctgggcgacagagcgagactccgtctcaaaaaaaaaaaaaaaaccactcacacggttaatcatgggtgcagttgataattacaggcacaattaaccacttgctaattttgagggtgcgagcagttaattacattcacaattaggcaactgctgtaggcctgggaccggagtcctggtggggggacactccttgtaatcagactcccagggtgaggccctgtggtgggggtgagggtcaggtgatctgcgaagcacccccctcccagcttcaagtggggagcttacaggcctagaggtcagggcctggcaaacgacctgaaaaatccagcttgaggccctttccagggagccccagaggccttctcttgggtcatttcccaggatgggggtcgctgtcactcctctgtcccaggaggattcagagaggtcagttcacaggcctatgctgggcagagccactcatccacggcactggccactcagccaggtattgacagacccacccgcagggcagacaaaagaggcatggcccagccagctgcgggaccctgcaccccccactcactcacacatgtgcacatgcacacacatgcacacgtgcaaacacacacacacgcacacacacacagccctcctcggctcacagggggctgcaggacgctgtccaaggtactgacctccctgctgctgggcccctcgctgctgagccaggcaggggaagtcagctgggccaactgggagggtcgggcagggacagcacctgaaatccctgctcagccccctgtgccgttcctgcccctgagaccacggccagccacccaagggctacccctcagcagcctgaggacacagcgccggctcttcatctcaagcacacggaggtgcaagagggagggtctgcggcctcggcagagacagccggatgcactgagaccctggcctggggcaggcaggggctccctcagggggctcagaaggggtcaatgctgcagaccacaggccggcccagcctcaggcacggtccacctggcacagcacacttcacagtgttgaatatactgttgtatttgtttcctgaggtaacaaagtcccacaaactcggtggcttaaaagaaagacatttatgctctcccagtcctggaggccaaaagtctgagatcagtatccctgggccgaaatcaaggggtcggcaaggctgagctccctccggggaattaggggacgagccctcactgcctcttccagcctccagttccttggctcacgcccacatcactcccgtctccacctccatcttcacttcatcttagtgtaacctccctccatctccctcttacatatggacacttcccattggatttcgggcctatgactagtcctgaaagatctcatcttgagaccttcaacttgatcatatctgcagagactctatttccaaataaggtcaccttcacgggctgtttttcttttagggcggtgggggtggggggggggggatttttcagctgaccacaattgtcaacattaaaaaatcaagatattgtaggggtcccacctagatattgaggaggtggacaacaggaggactgggtctctccttcatccctcagctgccaggatggagggtttggggggggtcatttcttacacagctcccagtaggagatgctgtgtagccttgggagtgtcacttagctacctctgggcttccttgtctgttgctgggaccgtgtatcagctagttgctgagtaacaaacacaaacacgatctcagcagcacagagtcagcatttggttggctggtccaggccaggccgctggggcagctgagctctgccccccactccctcatcctccccctgaccagcaggctagccaccctcactgatggcagcaacacaggacagcagcctggtcaccgcagctctcagttcagagcaccacatgccccgtgaacatcccctcagtcaaagcaagtcacatggctgaacccacagtcaaggggcagggaattagactccacccccttagtgggggagcttcagaggcacagggcaagcgtggttggcaggggtgaaggatggggccagtgatgccaggggcccacaggggtgcatgggggtcagaacccatcattcactccccaagcacaagcccagggccagctggcccacaggtccccctggtgcccagcatccccccgtccccctcccatggggtggggctcgcatccaatgcctggttccaagtgtcctcctcatcttacctgcatggtgaccatccaggacgctctccctgagcccgctgcttactgagtgccacggaggcctgcagggggagtgggcacacacaggagagacgcatgatttgcaatctcgttaatgagccgtagcacaatcacagacctgccctgacaaggagctgcactcgtggtaacataaaactgtcagccagctgggcgcggtggttcacgcctgtaatcccagtactttgggaggctgaggcgggaggatcacccgaggtcgggagtttgagactggcctggccatcgtggcgaaaccccgtctctactaaaaatacaaaaatcagccaggtggtggtgcatgcctgtaataccaggtactcaggaggctgaggcaggagaattgcttgaacccaggaggcagagtttgcagcaagtcaagatcatgccactgcactccagcctggtgacagagcgagactctgtctcaaaaaaaacaaatttttttaataaaaaaaaaacctgtcagccaacgaagctcattacaagctgctcctcagacttcctgtcagctgggactgcatccgcctgttcagcccttccaggcctggagctggagcccaggagggaggccaaggggtcccactgcagctggggtgctgactgttagctaccagcccttccgtgggcctgtcaggttcagtctcggatgctgtggggccctgggacccctcatgggaagctgacttggaccgttcaagagccctatctagccctcagcaggacaagatcctctcagcaacatccccaacacacactcaaccagacagcctgcaaagagccagttctgtatttggacagctcggctccccatggtacccttgtactccatggtaaaccaaaacaagcttctttgtaacttccacctactaaaaccattccattaccaccaactaagacggattctccacctgcccatcccaaacctacccccaggtgtcccgtgtctccttgtctcctgcatctgctgcccacgtgcaggctgagtgtgaaataacaaaggacatcctcctggtggcgcggggcagagagccaactcacagaggggaggacatccacgctggccacgagccagctccccacaatgaccagcccagccaccccgatggtgggggagaatgggtcctccctctgcgatctgagagttccactcagtagccctcaaaccctactccacacacacctgttcgccctgaatctaatgtgctcactttgagctatcttcctgtatgccttttcccaggctgataccctcttttctttgcttttgcaaactagctgaatttcttagccagagccatcaggcaagagaaagaaataaaggacattcaaattggaaaagaggaattcaaactacctgtttgccaatggtatgatcttatacctagaaagccctaaagactcctccaaaagactcctagattcgataaatgaattcagtaaagcctcggtcacaacatcaatgtagcactgctatacaccaacgatgaccaagctgagaatcaaatcaagaactcaatcccttttacaatagctgcaaaaaaataaaatacctaggaatatatgtacccaagggggtgaaagatctctacaaggagaactacaaacactgctgaaggaaatcacagatgacacaaatggaaatatatcccatgctcacttattggaagaatcaatattgtgaaaatgaccaaactgcccaaagcaatctacagattcagtgcaattcctatcaaaataccaacattcctttttcacagaattagaaaaacaatgctaaaattcatttggaaccaaaaaagagcctcaataggcaaagcaatcttaagcaaaaagaacaaatctggaggcatcacattacctgacttccaactatactacagggctatagttaccaaacagcatgatactggtgcaaaagtagataacagaccaatagaacagaatagagaatgaagaaataaagccaaatccttacgaccaactgatctttgataaagcaaacaaaaccgtattcaatagatgctaggaaaaactggtgagccacgtgtagaagaatgaaactggatacctatctttcagcatatacaaaaatcaactcaaatgaattaaagactttaatctaagatctgaaaccataaaaattctagaagaaaacctaggcaaaactcttctggacatcagccttggcaaagaatttatgaccaagaccccaaaagcaaatgcaacaaaaccaaatataaataagtgggacctaattaaactaaaaaccttctgcactgcaaaagaaagaatcattagagtaaacagaacacccgcagaatgggagaaaatgtttgcaaactatgcatttgataaagaactaataatcagaatctgcaaggaactcaaatcagcaagaaaagaaaaacaatctcattaaaaagtgggcaaatgacacgaatagacatttctcaaaagaagataaacaaatggccaagaaacacatgaaaaatgcttgacatcactaatcattagggaaatgcaaattaaaaccacaatgagataccaccttattccagccagaatggccattattaatgttgcggtaaactgaggaacggagagaccactatggagtacaggaggattgttgtttattttaggtacgtaccggctcagaggactcacatccaaaaagctgagcattgaacaaagactgagcagggtttttataagcggacttacaagagtaaaacaaagcagttaatcgtacagtgacaggtcacgtaatctatagcgtaactgttgacttagcataacttgtggccttgcatagctagtgacctcacagctgtgtcaaaagaaaaacaagaactagctaaatacagacatttgtaaaacataatcatgcttaagaagcctgggaaaggagtaacagtaaaagaatttgtctttcttttttccctcaaccttgctctggagtgggggtgtctggagcccattcctttggcggtggctactcaaacagtgttatcttataactgtccttgaagtgagcctgctgcactttcccctgctaggcagaggaaaacttgttcttttctttttaacctttgccttgcctgttacttttcttagagtgaatgaatgcatatttatttttaaatttctgcctcactaaaaagtcaaaaaacaatagatgttggtgtggaggtggtgaaagggaatgcttacacactgctggcaggaatgtaaactaatacaacctctatagaaaacagtatggagatttctcaaagaactaaaagtagattagccattcgacccagcaatccctctactgggcatccacccaaaggaaaggaagtcattacctcaaaaagacacctgcacatgtgtgtttatcacagcacaattcacaactgcaaagacatggaaccaacccaagtgcctatcagctgatgagcagataaagaaagtgtgagatagatttagatagatagatagatagatagatagatggatggatggaaggatggacggacggatggtcggacagacagataatgaaatacacacatatatatgtcatgaaatacaactcagtcataaaaagaatgaaataatgcattttgtagcaacttggatggaactgcagaccattattctaagtgatgcaactcaggaatagaaaaccaaatactgtatgttctcacttataagcgggagctaagctgtgggtacacaaaggcatgcagagtggtataatgaacactggagaatcaaagaggaggagggagggatggggatgagggacaaaaaactacctattgggaggccgggtgtgatggctcacccctgtaatccaagcactttgggaggctgaggcaggcggatcacctgaggtcaggagttgaagacaagcctgaccaacatggagaaacccatctctactaaaaatacaaaattagccgggtgtggtggcgcacgcctgtaatcccagctgctcagtaggctgaagcgggagaatcacttgaacctgggaggcagaggttgcggtgagccaagatcatgccattgcactccagcctgggcaacaagagcgaatctctgtctcaaaaaaaaaaaaaaaaactacctattgggtacaatgtacactactcaggtgatgggtgcactaaaatctcagacttcaccactacacaattcatccatggaaccaaaaaccacctgtgcaaagctattgaaataaaataaaaactagagctgggcacagtggctcacacctgtaacctcagcactttgggaggccaaggcgggggatcgcttgagcctagcagttcaagaccagcctgggaaacatagcaagaccccatctctactaaaaaaaaaaattgtttaaaatatcctagtgtagtgacgtgcgtctgtggtcccagctacttgggaagttgaggcatgcagatcacttgagcccaggaggccaaggctgctgtgagctgtgatcacacatctgcactccagcctggatgacagagcaagaccccgtctcagaaaacaacaacaaaactctctgaggtataatttacatacaacaaaattcaccaattttaaatataatttgatgagttctgacaaatgtacacagttgtgtaaccaccagcacgatgattacgtggaacattcccatcacaccaaaactagttgtgtaaccaccagcacgatgattacgtggaacattcccatcacaccaaaactttccctccctgggcctctttacactcaatcccctcctccaccctcgccctgggctcctgtattctattcgctattcctgtagttttgactttcatataaatgaaaccacccaggatgcagcattttgagtctgtcctctatcaccaaacataatgcttttgagagttatcgttgctgcaccctggggtagctcattctgtttttctagctgaaaaactttccttatgtgggtgtactacaatttattttatccattcacctgttgaagggtatttggcttgtctcccgttcacggctattatgaataaagccgctatgaatgtcgaagtcaagttctttacatggacagaggccttctcctggatggccacctggggtggaactgctggatcacgtggtgactgaggtgtaacttttcaagaaactgccaggctgatttctaaaatgtctgtagcatgttacactcccccatgcagggtctgggggttccagcgaatctacacccttccctgcgctggcatggtccgtcctgtacattccagcctttccaggaggagcgcagcagtgtcccactgtggttcaaatttgtgtttccttgatgacgaatgacgctgagcatctttgtgtgtgctcatttgccatctgtacttcttctttggggaagtctgttccaatcccttgtctcacaggaatgttcgtctctatatttggctacatagttgccatttctggtgctatttctttactgttgtgtccgtttgatatgactttccttctgcttacagagcttactttaaccttacttaatatgttgaggatgctgaggcaggagaatagggaattggggtaaccaagggttaaggcagaagcaaaagagcagcaggctccgccagctccaggcaagactgggcggcacacaggccgcatccccacccctgtgatgacaagacagaagcctccacgtcagcctctgattggccgcagatcaatccttcatagggtgtaaccaatgggaggcttctaaagggcacctaggggtgttaccaaatcttttagctttataaaaacctggggagcattgcaatgggggggatagtgtcttgagccacttgctcgagtccgctcccactctgcggaatgtacttccgcctcaatgtagctgtgccttcgactcagcaaaacagaaataatattccaaatacgcacgatggtaagaaccaacaggaaccctcatatcctgctactgcagccgcacctatgattggttatcccgggccaaaaagacattttcagtaagactttagaagtatatgtaaatgtctgtttttcacaattgctccatatattgtgtgttttcagacaagacagttatttaagaaacgggaattgcagaaatggctgtagtgcagcggtaatatttaagtcgactagttatccacgttcctgaaacaatttctaaggttttttttttgtagtagaaaatgtaggcagtgttttcacaaaagtaaatgtacagtgatttgaaatacaataaatgaaggcaatgcatggcgttccagtaaacattttaaaaataaataaataaaaatctgtgctttcgttactcctttctttcgttgcttgcctttcattgcttcgttcttttgttgctttgtttgtgcattttgttcaattctttgttcaacacaccaagaacctggacaacccacagtcaagacgttccacccggtaacaatgggacatcactttaacattgccgggacacaggtctgatggcgatgaactctttcaatttttgtgtttctgaaaaactaatttcaccttttctaaagaaaaaaatgttttcattgggtaaagaattttaaattggctgggcgcggtggctctcgcctataatcccagcactctgggaggccgaggcaggtggatcacctgaggtcaggagttcaagatcagcctggccaacatggtgaaaccctgtctttactaaaaatacaaaaattaactgagcatggtggcatgtgcctgctactcaggaggctgaggcacgagaatagtttgaacccgggaggcggaggttgccgtgagccgagattgcaccattgcactccagcccagccaacagagcgagactccattggaaaaaaaaaaaaaaaagaattttacatcgactgttgttttctttcagtgctttcgggatgccgttccaccatttccagcctgtgttgtttccaacaatgcaaatattctgacaaaaatattgtcatccttttgttccttaaaaattttctttttaaggccatttgattttttacgtgccttgctgtcagtttttgttttgttttttaaacagggtctcattccgccacccaggctcaaacaatcctcctgcctcggcctcccagatagctgggactgctggtgtgcatcactatgcctggaaaattcttgtattttttgtggagttgggtttttgccacgttgccaaggctggtctcgaaatcctgggctcaagcgatcctcctgcctcggcctcccaaagcgctgggattacaggcgtgagccaccgcgcctggctgatgtcgggtttttgtgtgtgtttcttatgttttgtgtgtttcttatgtatgagcttcttagatttcaccaaatttggaataactttaatcactatttcttcaaatgtttttttgcttctcctctttgggaagcttcccttacagacatactaacccgttggcatcatcctcatacagcccactgatgctctggagtctttttccctcccttcccctcatgtgttatattttatatgatttctactgctacatcttcaggtcctctgctcttttcctccgccaagtccactctaccattcatgtcgtacctcatccagtgtgattttcacatcagacattgtggtttttatctccagcagtttcgtcagagactttttttttttttttaacaacagggtcttgctgtgttgcccaggctggtcttgaactcctgggctcaggcgatcctcctgccttggcctccctaagtgctgggatcacaggtatgagccaccatacccagtcttgtcagagcctttttatacgttctttgtctcttcttgggctttcagctggcttcctgagcatgcatcatagttacagtgactgtgtgaatttctttgcatagcaattctctcacctatcacatttctaggtcaattttaatgggttggattttctgctcattacgggttgtattttcctgcttctctgctggcctggtaatttttttttttaattgaatgccatacattgtgactgttacgtttctgggtgttggatgtttctgtattccaaacattcttgagctttgctgtgggacactatcacgtcacttaacagtttcatccttggggaccttgctttgttaggtaggaaagcagagcattcctcggtggtgaggaaaagtccttctgggtgctctatgccacgccccacgaatgaggaggtgtttgcctctgactgatggctagacgccctattcccagccttgtgtgagctctggggattgttccctctaaccctagcgagtggtcctttctccagctgggctcatgttacggggctgcactgacacaggacatgaacgaggtggtataaagtaacagaagtgtattccctcagttctggaggcaagaagcccaaaatcacggtcatgtttccctgataaggggaaggcggatgggcctggggagtgtggtgcagggtgggctgaggccagaggagaggctgccacagggcgtggagcagagtttgtggggcacactgtgcacagtgacctccaccattgtttaattggattgggtcccagagttctacttggctcatgagccctgatcagccattcacaggctgtaggaccaggaagttttccagatagaacaggaagatgtctccaggcagcagtgattcaggaacagcaggcaccgataatgaccagaaagcagacactcccagcgaaaatgagcccgcctaggccaggcatggtggctcacaccggtaatcccagcgctttgggaggccaaggcaagaggatctcttgagcccaggagtttgacaccaatgctagcaacatagggagactccatctctacaaaaaaattttaaaaacaagccaggtgtggtggtgcatgcctggagtcccagctacaggctgaggccgaaggattgcttgagccaggagttccaggctgcagtgagctatgattgcaccaccgcactccggcctggacgacagagagatcctgtttcaaaaacaaaaaacggccgggtgcggtggctcacgcctgtaatcccagcactttgggaggccaaggcaggcagatcacgaggtcaagagatcaagaccatcctggctaacacggtgaaaccccatctctactaaaaatacaaaaaattagccgggcacggtggcaggcgcctgtagtcccagctactcgggaggctgaggcaggagaatggcatgaacccgggaggcggagcttgcagtgagccgagatggcgccactgccgttccgcctgggccgaagagtgaggctccatctcagaaaaaaacaaacaaacaaaaaaaaccaggagcccaccttgaccacgtgagcacatctaggaggaaagccccccatggctcaggagactgctgacaaaacacacagagaccccgggaggcacaggagacaggagtgccgctcgccaccaaaccacacccaccgccggggcctgcttccctctctcaatcccgaagggaggggagcaactggggggctgggctacaggaggctttggctgagcccctccgtgcccagggtacaacaaatatcaggacagtacacagggacttgccttaggaaagcccacccagccaagcacaggacttgcatgaagatcagaaagtttactgaggcacaggaagacttcctctggagatggaaaggaggcaagggccccggaccacactcttcttagcattggcctggaagcctcagcctgtgcagaaagcaagaaaaaataaaagatgtaaaggttggaagggaaaaaaataaaatgtggttgttcacggatgacacagctgcatacagaggaacgcctcaagaatagataaacaatctgttagaattaatcagtggagttataaggtcactggggacaaggtcaatatacccaaaaaacaaatccatcaagtgtttgtagactagcacaaacaaacagaacacgaactttaaaattatagcatttacaacagtatctgtattagtccattttcatactgctgtgaagaaatagccaagatgggtaatttatgaagaaaaagaggtttaatggactcacagttccacgtggctgaagaggtctcacaatcatggcggaaggtggagaagcaaagtcacgtcttacatggcggcaggcaagagagcgtgtgcagggagactgccctttataaaaccatcagatctcatgagacttattcactatcacgagaacagcacgggaaaaacccacccccatgattcaggtacctcccaccaggcccctcccacaacacgtgctgattatgggagctacaattcaagatgggatttgggtggggacacagccaaaccatatcagcatccaaatacttagaaataaatctaattggagacatgaaagacctccacctgcaaactacacagtgaaattaaacacataaataaatggctatgccatattcctggattagaaaattcaataatgtaaaatgtcagttctccccaaatcaatttgtagattcaatgcaatcccagtaaaattcctagttgagtttgtttggggtggtgtttgtttgtttggagacagggtcttgctctcaagaccctaggtcctggacagggtccacccctaggctagagtacaatggcatgatcacagctcactgcaaccttgaactcctgggctcaggtgatcctcccacctcagcctcctgagtagttgggactacaggcatgcatgaaaatttctgtattttttatatagacaggatcttgccttgttgcccagactggtctcaaactgccaggctcaagcaatcctcccacctcagccagccaaagtgctgggattacaggcgtgagccaccgcaataggccaattttttttttattgttttgttttgttttgtttttttaaactgagctgagaaacttcaagtcactgctggaggagtcaagacggcaagccaaagccctgtgtggctggggtggggtctggccccgcttcaccctcacggagcctccttggctttaggaagagcagaggtcctttctcaggcactggtggctgtgcttcaagctgctgtggtggaggctgagccagtttcccacccacctgcctaccaggaagccccgagtctgtccctgcagtccctcctcctgggagctgctgccgaatctagggtgtccccgcctgttttgctttctgggaagagtctcctctctgagaagcaagatcccctggagatgcggtcggtgctggctccgcctgccctgccctgcctgcacaccgttccgggtgtcaccaccccaggcgactgcaggaccctagatgccctgaggtccgggaaggcggggggtccccgagtcttttactccctggagataagccttcgcggggttcgcaggactgcgtcctcctgggcccctttttccttttttcttctacctgggggttgtggtgccaaatgcctcttgggttccaacgtctggtgccctctcaggagttccaccggcaacgacccgacgtgcagggactgtggcaggtttgtgacccctcccctccccgcagagcctggcacatcggcagccctcccgcgagtcagcctgggtgactgcgactgccctgggctctaaaccccggggtacgggccaggtgtctgcttggggaggtgtagacggacacaggcagggtgggaggaggcgaaggtgtcctccacgaaggacgcggggcgcaccgggactccagtccccggcaccctccacccggcacccgcgtccccacacgggccgcgtcccgcctccccagcctccctggcccccccggccgcccccactcacatcccgttgccccccacctggcccccaccatgcacccagcatcccaggcccaggtgccccgccccgggccttacccacgggctcgagcctgatctcctccccgggccccccgcccctggctcctcctcggctcccacaaggcacagcctgtgtccgccccagacccgccgcgaactcgcgctgccacctgccgcctcggccctgcccccggccccgcccccagccctctagccccgaccccgaccctccggccccgcccctcccctggcctgccacgtgtcccctaccccgcagggcagctgcgtgttttgtgttcctgtctctgcggccaggtgggggcgagtgcgctgaggtcaaccctcggccacccgggcgctgggtggtgctgccactgtccccatttcagagatgaggagactgaggctcacaggggaaagggccatctgcatccggaggagggcctaagccagactctccctggaggaacagggaggcctcgactagcccctccccaaacgcagcaagtgggtgctctgaggagggggtgtggggacccttccctctggggccctcagaaggggtgggcctcagccccaccatgtggccccaatccagccctcaggacccgccaggagtctcagcacctccccacacaccgagtgtccaaaagcctctgacatcccctctagggggagcgctccccaaagtctctctggcaagggttctcggcaccaccagggttggggcccacgcttcttttcccctcaatctaccctgggaggggaagggcggggaggggccctggcagggcagcagcgaggactgggcagttggctttccagggcctggcttgcaatgtcgggctccccctccatcctcagctcctgggagctcgttctcgtggctggctgggtccaccgcagcctggaattggtgtgtggcattcttatagccacctgcccccaaccatgaaaacagacccagtgccagtcttcaggcacggctggatccaggcgccagtcctcaggcacggctggatccaggcgctccgggatgccatcaaggctggctcttcattcggcctctgtgttggtctcagccacactctgccccgcagtggccacggtggcagtccttggacaactgagctgacgtcctgccagcccccaaacatgaagtgtccttctgggagttcctgtaacatgtctgggtgagacaggactggccaggctgaggtcacggccatccctcagcttgtgtcagtgaccaagacaagccaggccacatgacccacccccctgggtccaccccgagcgggtaggatgggtggggcctgctggccccatgtgcccgtgcaaggcgctgtgccgggagacacggggccccctcagtcatcacgtggcatttctcataagcttctgaggcggcccagggaccaccagggctccagtgtggccaagaagtgaagtctgaagtgacccagagggctgctggtgaggggatgagtgctcaggacggaggcggagggcttcctggagctggtggcatttgagaggacataggggaagagcagcacagagtggaaggccctgctagagaactgggccacattcaggggactctggcagcccagcaagctccagctccttggacgcttgttggcgaaacaatattgtacgtccctccctccccaccacccctgcagcctagagatggaaaggtccctccaccaggaccagacctcctccctcctcccacctcggacctcccaccccacctccagcatcagcagacagtgctggacctggaccagggtcaggagcagtgccccccaccccgcccctcagcaccatcaaacctgccacctccctgcaccccttcccacctcccctcccttcccccttcccctcccttccttcctcccctttttttaccccctcctccctttccccacctcccctccgttcccccctccctttccccctctcctcctttcccccgtcctcccttcccccctcccctcccttttccccctccccttgctgccttttcccctcctccctgcaccccctgctcccctcccccttcacccatccctcctccctgtaaccccctccccactccctgaaccctccttccccttccctgcaccttccttccccctccccagtgccccaccctcacctcttccccacccgcacctctgcttcttccatttggcacctcccatgttcctgtctccacacacgaacgcagcttttttatttttcattcatttatttttgcagcgttattgagatagacctgattgacgtatggtaacctgcatatatttatagtgtgcaatgcggaaagtttcgacactttgcacacctgtgaaaccatcacagtcaagataattctccatcacccaagtttcttcacgcccttggcaggcctctcccaccccatcgacaaaggtgcccaagggcctttcctcactcccatcactgcgctgcccagcatctcccacaagtggaagcagcgggctcctgctgtcgcaagcgttccactgcggggtaaaataaagctgctgtgaaccttgtacaaggctttgctggacacctgtgttcatttctccagaagcagcggtgagagacgcatgtttaaccccttaagaaactgccagaagggtgtgaaccacagtccacaccccagcacctccaggagttccgtgccctcccgacactcgtcctggtcccatcctcacgagtgtgttcctggtattttgttgcgtttttaatttctaaataagctcaggaaacatgattctcaacatcctcctcagatgcacccagagagaagccgcctctcttctgctcacacctgagagctctcctgtccacctgcgcccttccccagccccagccttttccacctcaagcctctacccagccccttcgccagccaggaggctccccagggtccggcccctgcagcccctggaagggctcccatgcctgagaggcgctcacagcacttgctgagtaagaacattgagaaaagacagatatacgcatgcccatccttctcaaacagaaattctagcagacagatatacgcatgcccatccttctcaaacaaattctagcagacagatatacgcatgcccatccttctcaaacaaattctagcagttaggagtgaacagcctgacaagcagctagctgcgtttctaacaaggagtgtgatctgtcttccaagcaagtcttgaaggtgctctaggaagctcccgttcgaccttcctggtgagctcagcatcacagggactatgcccagcccagctttgtgtcaacgctctgctgggcatagccagcgccgccagggagggggcttcggaaggctgcatagggactggggtctttcgaatcgcataaccaccatcgtgagatcaggcactggttgagcacttgctgtctgtatggcactgaggacacaggaggccccgatgggtccccaaagctgctcagaccaatgaaagcctagagcagcacagatgccactgcctcagtggcagccccgggtgaatagtgccctgaggccagggccaggtgaaggctcaggggaccttttcctttttttttttgagacagtcttgctctgtcctcaggctgtagtgcagtggcatgacattggctcactgcaacctctgcctcttgggttcaagcgactctcctgcctcagcctcccgaggagctgggactactggagcacaccaccacgctcagataattctatttttgtagagatggggtttcaccacgttggccaggatggtctcgagctcctgacctcaggtgatccgcccgcctcggcctcccaaaatgctgggaattacaggcctcatgagccaccacatccacccagactttttcttttttagataaaattacacttgatttgtagacctagtattaaaaagattttttttaattacatttggaggccaccgtctgatagaagggaaaacgccagcaactgactgtggagaaccaccagatttgtagtcagagcagcactggaaaaacgatgacaacttctcaggcactcggccccccatcggagcactcggccccccattggaacactcggcccccccatcggggcactcggccccccatcggaacactcggccccccatcggaacactcggccccctcatcggggcactcggccccccgtcggagcactcgcccccccgtcggggcactcggccccccgtcggaacactcggccccccgtcggggcactcggcccaccatcggggccattacatgccacgagtcctttggtgtcagatccctagtgcggggccaggtgacccacctgggtggggcccaagcctttcccggttgcttaactgaggtgcccttacactggctcaaatgcacagatattacctgtcagcttagtgtttcacattggcacgcgcctgtgtgacacccatgatgatcaaaacagaacattttcatcaccccagagggccctggcgccccttcccgacagtctcctcaccggagccccacaccctgcttctacccacccatgaacttccatcaggcggaatcagaatgcataggcttctgtgtccggcctcttccagtcagcgtagctcctctgagattcagctacctggtggagcatatcagtagttcgttcctttttattcctggggggcgtttcactgactaaatatgcatctgtttgactctccattcacctgctgaagggcatttgggctgcttccatcttgagcatcaatacggccattgtgaacattcttgtatgacttttccgcggacaaaggaactcattctcaagtagatgcttaggactggaactgctggtcacaggatagatgtgcattcggcttcgtcgctgtgtcacacactgaagagatgcccattcagcttcatcactgcatcatcacacaccgggtagacatgcattcaacactgggtagacgggcattcagcttcatcactgcatcacacaccgggcagacgtgcgttcaacactgggtagacgggcattcagcttcatcactgcatcacacaccaggcagacgtgcgttcaacactgggtagacgggcattcagcttcatcactgcatcacacaccgggcagacgtgcgttcaacactgggtagacgggcattcagcttcatcactgcgtcacacaccgggcagacgtgcattcaacaccggttagacgggcattcagcttcatcactgcgtcacacaccgggcagacgtgcattcaacaccggttagacgtgcattcagcttcatcactgcatcacacaccgggtagacgtgcattcaacactgggtagacgggcattcagcttcatcactgcatcacacaccgggcagacgtgcgttcaacactgggtagacgtgcattcagcttcatcactgcatcacacaccgggtagacgtgcattcaacactgggtagacgtgcattcagcttcatcactgcatcacacaccgggtagacgtgcattcaacactgggtagacgtgcattcagcttcatcactgcgtcacacaccgggcagacgtgcattcaacactgggtagacgtgcattcagcttcatcactgcatcacacaccgggcagacgtgcattcaacactgggtagacgggcattcagcttcatcactgcgtcacacaccgggcagacgtgcattcaacactgggtagacgtgcattcagcttcatcactgcgtcacacaccgggcagacgtgcattcaacactgggtagacgtgcattcagcttcatcactgcgtcacacaccgggtagacgtgcattcaacactgggtagacgtgcattcagcttcatcactgcatcacacaccgggcagacgtgcattcaacactgggtagacgtgcattcagcttcatcactgcatcacacaccgggtagacgtgcattcaacactgggtagacgggcattcagcttcatcactgcgtcacacaccgggcagacgtgcgttcagcttcctgtgtcacacaacatgccaccactggatgagagtctttcagattcaagccctgagggtgggcacacagtggagcctcgctgtggtgtccatttgcatttctctaatgaccagtaacggtgggcaccttttcagttgcttattcgccacttgtgtatcttttctaaagcacctgttcaagtgtctcgcacatttgttattgtgttatctttttattactaagtagtggaattctttattcctgtgtcatgtataaatattgcaaatatttctccaagtctgtggcttgcctttttactttatatacctttttttaacattctaaagagaaatttacattccatttttcctcagtaacatagcaaaactataaagaaaaaaatagagattagtatctaaactttttcagaaacaatgtatttcataaaaattgaatagacacttttttcccactgtgttcatgaaatctaaatgatagattgtggcattcgtaagtgtggtgaataagccagtctatagaaaatctcctctgcgtcccgtgtaagtgtggcgaagaagccagtctaaagaaaatctgtgcgtcccgtgcctcggaccacaacatgactgccaaaaagcaaaggttccactctgaccttgaactaaacgctgaccaacctccaagggcatcttgatgagcaaaaggctgtagctgaggcccaatttatgcattcttcttcaggatgtgtgccttctatgtgcttagaaatccttgcccactcccagtcatgaagacctctgacgctttccagatctctgatccacctcaagttgatggttacgtacagtgtgaagatggactccaagatcacgtttcccccacagggcacagaactgcaccagggccttcagccacgcctgtctttgctccgacggcacgacatcctgattgctgtcacttcaggggaagtcttgaaatgtgggagggtcaagtgctccattctgtcctaggctgtcttggctatttaagtcctctgcatttctatatacatttatggaatcagattgtcagtttctaggaaaatcctgctgggatttggttgagctggcattgcatctgtttctcagtcctgacagacttgctgtcttcagcaacacagagtcttccctactagcactgtggtgtcggcctccgctgagggctttgatttctcagttccagtgtaagatctcatacatctttcattcggtgtattcctgggcgtgtgttctccgtgctattgttgacggcatgtttttaaccttctggttgttggttgcgagtacacggaactacagacacctccagctaccggcctcgcctctggccctctttgggagttcacgcgccgtgctcagtgttgtgtttgtaagttcgtctggatttccaagacacacagtcgtgtcacctctgaatcctttgttcaccttcttcctctccatacttgatgcctctttttcttgccttttttgcccaactggagctgcctgtacgtggggagcagaggcagcaagagtggccgtcccagtcatgttcacgaggctgctcgtgccccaggcctgggcaaacacccagatcagactgagggcagccagcaaatctgtgatgagatgcgaaacagcagctacgggtctcaagaacagagtacaacaaacatgcctgcagacccggtcttctggcagtgcccggctgaggggaatctctctcatgttggcctaagcctcaagtcaccatgaccgtcccacacagactgactggacccgacagaagagcagaagagctggaatgaaatcaatcatacttgcagaaattcaagtgcaactgccctttgtacctgattaaactaatttatttcaggtcaagaactttgtgaaaggcaggtatgggtcatggatggaaagcacagatgtgatcccatcagtgaacgaccctggcacggcctagagcgggaagctggagagggcgccccccagtgcttcctgccgagactctcagtgtggccacgtatccagggtgaattgtttcctccctaaaaaagatacggaggactctttacccccggtcctcagaatgtgactctatctggagttagggtctttacagagataatccagtcagaatgaggtcgtttgggcgggacctgatccaacaggactgggggtccttacagagaggggaagctggacccagagaccgacatacacaagggagaagctgtggaaaggcagaggcagagatcgggcgctgtgtctaagccaaggaacccaaaggtgccagcagctgccagaagctgggagagcagacccttccccagagcctggggagaaacccaccctgctggcatcttgatctccaaccgtggcccccagagcggtgggacgatctgtggtcctttgtgatggcagccccagtggggcagtgcaacaggtgtgggaacaggggcagtgtctccagcagaacgtgtacgtaaacctgcatatcgctgtgggtccgtcacagtaggtggagtgaacgtcacaatgggagaccaactccaattgcatcagagaccgttcccaaaggctctccaaggtgctcgaaggcagggagcggtacacattggcgctgagcctctgagggcccagcaggagctgtgacctgtcaggaccaaccaataccacaaactgccctggagacgccctctctcgccacaggaggtctgcgtcaaggctggggccctctgggcacctcagccgggctcgccacgtgcgtttctgtgtacatctcccccagcactgggcctcccgccgcccctcctagctgtgcccagctcatctccacctgtgacagcagaaggtgttaagcgcagccgccagcccccagactccacgcagagagtagctcggcccctgtcctcacagagaaagttctttctcccggctctgatggggctcagctacagattccaacaggtggctcagaaaccagcacctcagcagagccggagtgcaatctggcagtagaatctaaaactggaaaacggaggaaaaataggcaaaacaaatacagataaatttgtttttaataaaggagttaattttctttcaatcctatataaaacaatagcaattaaaaacttcatttctgaaagtaaaatatttacatatgaacaagtaactgtgcaaaatttacatgaaaaaatggaaagacagggatttcctaaaagacaaaataaaaggtgtaacagttctcaggtgttgataaaaaatactgatcagcgttcagttcacacgcgctcgaattaaagtctaatgtgagaattcacacggagaaagccagagtatttacagtcataaaagtactatcaatagacaatttcatacaataacctctgaaaatagaaagaaccaattagtatatttgtaataaaaaaataggtacaaagaaggggctttgctctggacgtctgtaaagtcggcccaaggcttgcatacagtctcttagcaaaataattatagtttacatagccatttctatgtcatgtgccaaaagttatgtacaattactgacaaaatacaccaaccatttttcaacacttgattcacaccgagaaacagtcttttgatgattcttctcaactttgattttatttaatctaggttttcacttttagctaaaaaacacagtgcaagtaaaatatatttatgctgaaaaggttttcatctcttttaactttacagctttacaaactatagcaaataaaatgcatttgtacagatgctgaccacacattcagaaggagccacctttgctgggctcggcctctaccaagcagaaatgcgattacactctgaggtgggggtgcaacgatgaattgtgtattcctccaggattctcagcggagtggaggggaagggaggggaggggagggcagggggcagagaggagagcggggtgggaggggaagggaaggaagataaatagtctaaaaaatcagtttgctttgccaactgactattacaaaaataaaataaacgaaatgaggtcatcggctgtagacatacacctacatagtaagttaggtagaactaaaccaaaatgcacaaataatgcagaaactgctatgagttgacagagggcagctaattatttgctaacgattccatcagtctttatatatggcttgtttggcaggaaggccactcaatcaagatgagttaagatttaattgtcctttaagagtatccacaggcctttgtgttctctctgttacagaaacgtgttttctttcacactgaagagctgatttagaaacaggaatataaaactgttccattgtaaagaggtggctgttttttaaacaatatcccatttgctcgttacaaaaaggcgtaatctgcaaatatataaaaagtccccaggcgtcctcctgtgtcacttaaggaatgctttgtagagcagcagtgaatggcttgtctcacgttcattttctaaacaaaatatgaggtccctgaggttgacccgcgtgattctttgtcgcgtgaactgtctgggggttccgacacccgagctgcctgggaccactgagccggggcccgacccctggtgatgaaaaaggagaagacagtgtgttagtggggctcagagtggggcttgcaatgagcctgtgtatctgagccaagtaccccgattccagaggaggccaggcctggcacgggctccttccggtaggcccacagctggagctggggtgctgtccagggccctgccagggcaggggcaagggcaggaggccccatgctgcaccttcaggacagggcacactcagatgctgcccaatgccccacagtgcttggacctggtcctggggctgaggatggactagggggtggcacccacccaaggcaaatggctgagcggccccagggccaccctccatgtgaccacagctggactgcctgtggactcagctggggcacaaaagccacactaggtctgtgtgtgtcatccccgcttggctgctgaattcctgcactgggaggcctggggttggctgggactgggcatgctgggtcagctgggaaggctgggtttctcagtggctcccacagtgatccctgagcctctggctgggccctggctgcacagacgccgcctccgtcagcccctacaggtgaccaggtgtctcccgagctgcctcagatgtgttcctgcttggagaagcatagctgctgcgtgccagctcctgtggagagctctggcggtttcagctgatgacacctgcatgacaccgcccagcagggcacgcgccacacacacgacaccgcccagcggggcacacgccacacacacgacaccgcccagcggggcacgcgccacacacacgacaccgcccagcggggcacgcgccacacacacgacaccgcccagcggggcacgagccacacacacgacaccgcccagcggggcgcgcgccacacacacacaacaccgcccagcggggcgcgcaccacacacacacgacaccgcccagcggggcacgtgccacacaactcccaacagctgtcatttcccccagctggcatgaaaactaagttctgctccgatggtgaaagctgctcacatatatttaagtacaaagattacgatggcatctttacagcacattctcaaccaaagttaagatgctggaaggagcggattctgctgtgtgtgccagtgggagccttgctgtgaacagccctgacatggccccgcccctcatgccgtccttcctccccccttccccgttctgccactttcagttcaggctgggagcatggctgccttgtgtgatggcatgcaagtgtgtctctgacccactgcattttctttattcctgtgagattcaaacagatgagggcacctgtctccgttcagacgccctgcgctgtgagggcccttcttcagacctgcccggggtccctttgctactgaagcctccgcactccacactagctcattataaagtgatccgcacctgagggccaggcctcccaaaagagaactcaggcgaggtgagtgacagtttgcagggtgagggcagggctctcacaggcaccacccaaacaggctgtgtgacccagtgacacctgctataaattccggactgtgtttgatgtttctatcttcaaaatagttcagcagctaaaaaagaggaccggggtgaaggagagacgctcatctcaggtgctcaatttaaaggctgccgagggtaagaaatcaagatattctaacgcaagtgtcagcaccaaccaagggagggcacgagaccaaccaagggagggcgcgacaccaaccaagggagggcgcgagaccaaccaagggagggcgcgagaccaaccaagggagggcgcgagaccaaccaagggagggcgcgagaccaaccaagggagggcgcgagaccaaccaagggagggcgcgagaccaaccaagggagggcgcgagaccaaccaagggagggcgcgagaccaaccaagggagggcgcgacaccaagggagggcgcgacaccaaccaagggagggcgcgacaccaaccaagggagggcgcgacaccaaccaagggagggcgcgacaccaaccaagggagggcgcgacaccaaccaagggagggcgcgacaccaaccaagggagggcgcgacaccaaccaagggagggggcgagaccaaccaagggagggcgcgacaccaaccaagggagggcgcgacaccaaccaagggagggcgcgacaccaaccaagggagggcgcgagaccaaccaaggccgggggcgagaccaaccaaaggagggggtgagaccaaccaaggccgggggcgagaccaaccaaaggagggggcgagaccaaccaaggccgggggcaagacgaaccaaggccgagggcgagaccaaccaaggccgggggcgagaccaaccaaggccgggggcgagaccaaccaagggagggggcgagaccaaccaaggccagacggtgcctccttggggctgaggccacccccagggcccagcacgctgagaaactgatgccaggccctgcttctgcaccaagctctgaaggtgcactatgaatgaacaatataacttctccagattctgtgagttttatcaatacaaatttttcttcaaatttttcttaaatcttaaaagaaaaacgcaaatctaacctacctgatactccaattgcctttctctacatggcacactcccgcttctccccagcccacttcgccccaggcaggaggggtccagactccctgtctttcccatagggtctttgcttgcagaattctatgtggattttggctcccgcagagagtttgttgctaaactgctctgaagatggagtggagatctcgtaggaacctccccctctcttctcaggactggggctgccagcggaccaaggccttctgtgcccaacccacacggcagtggcagtggctttcctccctagattcatccaaacccctcacgggctgtgcccatggtgggcgtagcagccagaggggtcaggcagggactggtcatggagcctgcttggagaagagtgcttagtgggggcttccagctccatgggactcctgagaaagaagggcctgtggggaccagggtcaaggcacccatggccactctagagggactgcggcccgtgcaggcgcaatggccactccagagggactgcggcccgtgcaggcgccatggccactccagagggactgcggcccgtgcaggcgccatggccactccagagggactgcggcccgtgcaggcgccatggccactccagagggactgcggcccatgcaggcgcgacggcctctagagggactgtggcatgtgcaggcgccatggccactccagagggactgcggcccgtgcaggcgccatggccactccagagggactgcggcccgtgcaggcgcgatggccactccagagggactgtggcccgtgcaggcgcggtggccactccagaggtactgcggcatgtgcaggcgccgtggccactccagagggactgcggcatgtgcaggcgccgtggccactccagagggactgcggcccgtgcaggcgccgtggccactccagagggactgcggcccgtgcaggcgcgacggccactccagagggactgcggcatgtgcaggcgcaatggcgcaaaacagagcctgggacgacagacagctccacaagggccggcaccaacatggagccctgggggcctcggcctaaacaactccaaacacaggggcttggggtttgttaggtacaggtgctgggattagaaaacaagcaagcgaagcaaaatccccgcggccctggacataccacgtgagccctccctttgcaggtccccacctctgacgcatggcgctgcagacagccctcgccccatcacagggctctcaaaaggatcaaatgaaaggaggaggtctctccaccgcatatgtgccatagacactcagtatcgaagccaaatgcagagtcgccgtccgcggaaccgcccggtgcagggtctgcgccacccaaacgtcaggccccacacggtcagcacctgggggctgtccgggaggagcgcgtctgctcccggggcgggagccccttggtccgtcctttactccgccacggagccccagccgagcaatgggtggagaatgctgtgcccacagccgccccgggcggcgggtaacaatagcctatgccgcacacactccagccacctccgccccgaacgcgtacgtgccctctccgtgcctaaccatttacggggtgtcacacacacaaggccaggtcactggcagcacgttttgaagaacagcagtagtagcgaaaaacactcagacacacagcttagaaagttagcatcacttccgggaggccgaagacaacgtggctgccgagctgatgtctcccagcctctcttccaaacacagttcagcacaagcaaggaacgcaggtttacaccagcatcgccgtctgcactggacgagggcgcctagacttcaaaatcactgcaagtcggcgcagagtcaacacacgcctgagcctgaccccccagtctctcccctgcaaggccgcggtggggcggggtgggacaggggtctgtgggaagccactgctgaaaggctaagccaccccaagtcccagggcctgagaggtgtccaggaaggtcagtgcagaccacagggcagggaccactgagcacaagacgggaaggggttgtcaaggcaacacagcatgtcctgagaggagccctttggccactgggtggtgaggcagaaaagaaggaaagggggaagttctgggtcctgcaggaaagggccgggagaactggaggacaacttccgtcctgcacaccagcaaggacccgctcaagacctggacttccccatgtggccagcagacggcaccaggaaaccacagatgtggcaaataccccaaggccaccagggcaaagggacagaggcggtaaagccacccagagccacgggaaagtcagagaagagtcaaaaaatgggggctccacacacatcagagaaaaacctaccctggaacaacaagaaaattaacaacactctcaatacaggaaaatctgcttaagtgtgcacttaaggatatgaaaatcatcacctcaaatcagaacctcaaaaactaggagacaaatttttataaaaaccataaaattacaaatgcaacaccaaaaggaaataagagttgactggacttaagaaagtaatggaaggaagagacaaaattatctcagaaatgaataaactgcaaacagtctgagggaggggaggcggtgaaaatgcagtaaggaacctacgaaaggcaggaagccaagaggacagaatcgagacacagaaaggaggaaaagggtcaggagaaaacagggcaaatgagagctgggcgaatctccccctcaggcagagtgggacattcacaccatgacccaggagacgttcacaaaagacagcaaaccacaccccacccgagaggagacaccaaacccacacccacccgagaggagacaccaaacccacacaacccacacccaccggagaggagacatcaaacccacacccacccgagaggagacaccaaactcacaccccacccgagaggagacatcaaacccacaccccacccgataggagacaccaaacccacacaacccacacccaccggagaggagacatcaaacccacacccacccgagaggagacaccaaactcacaccccacccgagaggagacatcaaacccacaccccacccaagaggagacaccaaacccacaccccacccgagaggagacaccaaacccacacaacacacacccaccggagaggagacatcaaacccatacccaccctagaagagacaccaaactcacaccccacccgagaggagacaccaaacccacaccccacccgagaggagacaccaaacccacacccactgagaggaaacaccaaacccacacctacctgagaggaaacaccaaacccacaccccaccagagaggagacaccaaaacccacaccccatccgaggaaacaccaaacccacacccaccctagaggagacaccaaacccatacccacccggaagagacaccaaaacccacacaacctacacccacccaagaggagacaccaaaacccacacccacccaagaggaaacaccaaacccacaccccacccaagaggagacaccaaaacccacacccacctgagaagaaacaccaaacccacatccacccgagaggagacaacaaacccacaccccacccgagaggagacaccaaacccacaccccacccgagaggagacaccaaacccacacccacccgagaggagacaccaaacccacacccacccgagaggagacaccaaacccacaccccacctgagaggagacaccaaacccacaccccacccgagaggagacaccaaacccaatgcactgcgagggcccagtgggcggcgggactctgagatgcaacctcatacactacgggctctcagagccgacggcagggctgccggggaggaagagaagagaacccatgaaggggaaggaatcagcctccatggctcctcccagcctgcacccccctccccacccgtcccccacaaggcaagaacagaaaagacttctgagccagccaagccgcctccggtcagggcccagaaacagcctcaggaatgggaggaagagcctcctctattgggcgggaaactgcagggaagagacatcctcaggctctgagtgaggcggaggcgggagagggaggctgaggaccagagtgtgcctcccctgtggaggtcctgtcaccaaaaggcagaggaagaagccactagggctcacagacgccgatggccaacagtggagctgccaggcccgtgcaaactgctcgactgcagcgtgaacagtcctgtgagacaggagaccagggcgtcgtcactagtttaagtacaaaagtaaccaggaagacacagatacaaaccttcctaaatacaaaaaaaaaaaaaaaatcaattaaaagagcaaagaataaacatctcacagaaaaagaaacacagcaaatatttaaaattcaggccaggtacggcaactcacacctgtaatctcaatgctttgaaaagggaggccaaggcaggaggattccctgaggctgggagtttaagaccagcctgggcaacataacgagaccccattcctacaaaatattttaaaaattagtcagatgcggtgctgtgtgcctgtagtcccaggctactggggcggctgaggcaggaggatccttcttaagcccagaaagtcaaagttgcagtgagctatgatcacgccaccaaactccagcctgggtgacagtgaaaccatgtctcaaaagatagataaaaatttacataattataaaatattatgatagagtcaagacaaaacatgtcagtcctatcaataaaggtaaatgggcttaactcacctattaaaagagaaagattttcaattcagctcataaactgagaccaaaccatatgctacagagagacacggaaaacaaagtgattcagaaggtgaaaagtaaggatctcagggattgtaggctgggggacaagaaagacacccagggtgacggtctgacgtgtgacaaagacagatactttctaatgcaaaaagtcacagctgccaatgaagatatgacacgtggatatttatgcaccaaacaacacagcagcccctaccaataaaaacgcaggagatgcgacgagacagaaacatgctagcagcagtcatggaacagcatgcctgccgcagaacaggtcaagtggacaaaactaagccagcagccggaagactgagcgacctcatcactgaggagcggctcggggatgtccacccgctcatcacgtgcctcagccctacgcacccacagcacacccacagacgctgactgcaccacccagaccagcaaacacaagaactatgacaacacacgtgggacacgtgtgaggctggggaaagagctgcctctctcacacgcaacagggggacttggcaaaacctaacacaagtgcacacgcaccaacccctcaattcagcaatcccatctctcggaactcagccccaacagcaggcctccaacagcacgaagacacacgtacaaggcgactcttgatggcatcacctgtcaccgtgtcgacagcccagatgtgcacacgagagagggtgaaaagctacgggacatcagcaggatgaagtgccacccagctgggaaagaggaagctcctgatgcagtgacacgagggcagtgcccgggacatcagcacgatgaagtgccacccagctgggaaagaggaagctcctgatgcagtgacacgagggcagtgcccgggacatcagcacccagctgggaaagaggaagctcctgatgcagtgacacgagggcagtgcccgggaactctgtcagctgcagagagcgagagactgtcactgacctgtgctgcactgccagggaaggaaaaagatgcaggagctcatctgtttgcatggtgagtagaaacgggatgcaaaaatggagggacggggacagggcaggaggagggaaggtgcagcaggactagggagggtgcagcaggaggagggcgagcaaggtgggaggagggcaggggtggcgggggtgggagggggcggaagggggaggacggatgtggtggggggagggagggcgcagcaggaggacggggcagggggtgggaggatgggtggagggtgtggcaggacaccactccaaggggcacttctttctatacgtttttgtacagttctgactctccggaccatggcaacgctccacctctcacaaacaaaaaatcaaccaagatttggaggaaaccaacaggaacacaaacagtaaccactaaacccgagctgtcctgcaggtgagtgacggccacactgagggactaaacccgagctgtgctgcaggtgaatgacggccacactgaagggtgggcaggaagccaggcctggttgtgtgtgcctgcagtcccaactcctggtgggggctgaggcaggaggattgctggagtctaggagcctcaggccagcccaggacacagagcaagactccatctctaaaaacaaataataaaaatttaaacataaaaagtaaaaatgaaaggataaacaagaacaatactcatctatgtaaatttgaaatgtactattttgacctgtgaggttaaataaaagggccgcacagaaatgctacactccaggtagttagcacgtttgtttctcacactgcctggcaatcccgaaggtcctttatctgtatgttggaactgaacacagaagtacatctactgtgggggatgagaaccaggttcccatgtaaggcacgagggaagctagaatgagcctgtgacgtcagactagatcctgaggcctgaggagaagtgagaaggccgctgtgttcagcacaggtgcaggtgcagacgagtgtttgtgtgtgtgcacatgccccagtccacctggaaggcctggatgcagggacaccccaggagcaatgagcacacctgctgcccagagtatggttctaaacaccatccccgaccaaaggaaccaccatccccgaccaaaggaagcaccatccccgaccaaaggaaccaccatccccgaccaaaggaagcaccatccccaatcaaaggaaataccatccccaaccaaaggaaacaccatcccccatcaaaggaaacaccatcccccatcaaaggaaacaccatccccaatcaaaggaaacaccatcccccatcaaaggaaacaccatccccaaccaaaggaaacaccatccccaatcaaaggaaacaccatcccccatcaaaggaaacaccatcccccatcaaaggaaacaccatcccccatcaaaggaaacaccatccccaatcaaaggaaacaccatccccaaccaaaggaaacaccatccccaaccaaaggaaacaccatcccccatcaaaggaaacaccatcccccatcaaaggaaacaccatcccccatcaaaggaaacaccatccccaatcaaaggaaacaccatccccaatcaaaggaaacaccatccccaatcaaaggaaacaccatccccaaccaaaggaaacaccatccccaatcaaaggaaacaccatccccaatcaaaggaaacaccatccccaatcaaaggaaacaccattcccaaccaaaggaaacaccatcccccatcaaaggaaacaccatccccagtcaaaggaagcaatgcccctccaagaaatcatggaaaacagaagatgtgctggaacattctgtggtgtcataaagtcaccaaatcctcttgtcgtgtcacaaggacatggaactaacctgaaggagctcatgatggccagagccgggctgctcaagcaacaaaataaataaactgtagcagcagcttgttacctacagaaaaaaataaatatccatgctaatataagtaagtaactgaatgaattaacaagtgggaaaaataagggagacggggcagctctctttacagaattccaattaataaatgtaaacagaaagacagaaatagaaagtcagcatcagacgccacagcagcctccactggcagcgtccttgcgaatgcccacgcaggggccaaaggcctgataagaaatggtatcagcagcctccaagtgtctccttgagatacctactaattacacagagaaaaagagtaactcgacaatggagtaaccagccaaccccaccttaaccaagcttcaaagtcagcagcagcagcagcaacagccaggcgacaccacctgcctcccaatccagtgctctgaggacacgccagccggcccgcggcattctaactgagattctacagcctggacgtcatcacgaggagacaccagacaaacgcaaactaaggaaacgtccaccagacaaggaccagagctctccagcacgtcaaggccatcaaagaccaggaaagactgagcagctaccaccaagcagaggagaccaaggagccgaggagccgcgagggtcccggggcaggaaaggacgtcgaggacactggtaagaatcgaataaggagaaaatatttgcaaaagacacatctgataatggactattatccaaaatataccaagaactcctgaaactcaacaatatcaacaataagctgctccgcatcctccgtcaccagggagatgcaaattaaaacaagatgcacacacctactagagcggccaaaacccagaacacggacagcaccgaacgctggcgaggatgtgaagaaacaggaccctcagccgtggctgctgggaaggcaacatggcgcggctgctggaagacagtctggcggtttcttacaaaactaaacgtgctcttaccacacggtccagcaatcgtgctccttggtatttacccaaaggggctgaaaatttatgtccacacgaaatcctgcgcacagatgtttataccagctttcttcataattgccaaaacttgcaagcagccacgatgtgcttcagtaggtgagtggataaaataaactgtggcacagccacacactggaatagtgctcagtgctgaaaagaaatgagccatcaagccatgaaaaaacacggaggaacctcaggtggatattcctaaatgagagaagccagtttgagaaggctgcataatttcaaccacatgatattctggaaaaggcgaaactaggagacaataagatccgtggaccagggactgacaggaggggagggatgaacgggcagagcacagaggaattcagggctgtggaacgactccacatgatacggtactggtggaaacacgtcattctacagctgtcaaaacccacagaatgtacacaccaagagtgcaccctgatgggaactatggaagctgggtgagaaggacgtgttgacgtgggttcatggattctaacaaacgcaccacccggccaagcgggggaggctgtgcacctgcagggaggagggtatgggaagtctctgtactaaaaaagtcccctcctttttccgtgaacctaaaactgctctaaaaaatagtttattaatttatttaaagttaaattaagggaaaaaatcaaataaggtcttcaatgaacagtatcatacccacgtttaacatgaggctaaactgggtgaggggtagatggaaactctctgtactatttctgtaactttcctgtaagtatagaattcaaaagtaaaagttaaaaaaagaagacttacccttaagaggtatcctacaagaagaaaagaatgactgagcatcatctttgatgaagaaaggtgtctgaaggacttttactttctgggttttgtgtgaattgttacacagataacacacaaagatccccaaagttcacaaaaggcaagcgaaacaactgcgaaacaactgctccccaaacagacgccggcgccaatcttcacccactcggcagtgcctcacctgggtcctccaggtccggcgttctcgatactccacgtacctcccagccccacaccccggcccttctcatgagtgaggacgcacgagctcccttactcttccctagaggctactccacacacgttaacactcacatccaaagttcatcaatgtgcctttcccatccaatcctccctcctggcgccgcgaccccagcaggtaaaatggttgggaagctggttacacggaagaaaaaaacaaatacactgaatgatgggaaccaggttcctcactgtctgagaagggaccaatagacaaggatgggggcggctaaacggaagccctggcgtgctaggcaaggaccgtagtctcaacacgaacacacaggaccccttcgacatggaagggcgcacaccacacactcccctacatgcatttgggtcccgagctctggctgctggcacggcctgggagcaggggccccagcaatcagcacaccaagtgccccgatcctggcctctcaacaccagactctactagaggaaccaggggaagctgcagagtgggcagggaaagtgcacgtggcaataaggaatgccacagacgagggaagtgtcaaaggatacagactccagccacaagaagctcccaccaagcaagcctagaaataatgagagtgctgatcagagcccaccaaacacaacaggggtcccggcacccacagcactgcagtgagtgagtgaatgagggatcccggcacccacagcactgcagtgagtgagtgaatgagggatcccggcacccacagcactgcagtgagtgagtgaatgagggatcccggcacccacagcactgcagtgagtgagtgaatgagggatcccggcacccacagcactgcagtgagtgagtgaatgagggatcccggcacccacagcactgcagtgagtgagtgaatgagggatcccggcacccacagcactgcagtgagtgagtgaatgagggaccctggcatccacagcactgcagtgagtgaacgaatccatgagcgaacgaataaaccaacgaggaggggcgaagctctgcttcccagcagagggcaaccagcagtaacagaaggggtgcctgaagcatccccacgactgagcagccccaggggtggcgacacaggcaggcggttaataacattgaggctgtgggtggaggtgcgataagggtggggcatctgtgtgaggtgggaacgtgtgaaatgctaacacggccatgggaatcggccacgacgctgtggagaaacacagcccacagcaagtgctatgctgggggtggtagcatcagtgctaagcacctgaccaggagggctgcctagtagccacctaaggtatcagccgcacgagcatttagggtgctgggtatcgtgtcagaacaaggattaaagtgtacatattgaaaaagtacaggagtgcacgcaaacacatgtggtgtagcggggacgaagcagacagcgtgatgctcatacaccggagtctgcacggagctccttactctgttcttgcaacttttctgtagatttgaaaactacttcaaactaaaataagtaattttcaaagttaatgtattctggaagacgatgacaggggtagcatagtttctggatcttcccaaagttccacataaaagagcaacgacacagcaaaaccaaaagccagcggacaatctttagaacaaaactgatgaagatgaaccacaagcagccatcacctgaaggacgctgcagaactggaccccgacgggcctggacccaggagccagcagacttcctgggaagagcagcaggtccctccaagagccgcagtcaaacctggggcaggggaggaccagggagggcagcctggccaccgcaaatgcccacactgacctgccagggctcctgcagcacagggcctcacgcaggagagaacctgctgggagtgaatcagtactgagcaggacagggacaaggaaggcaaagcaaagtccagatgcttgggaggtgcacagagccccggagccacagacgctgaggactcccgttcttaacatcacgggaaagtaaccacagaggagcaccacaaagtcagcaaacgctgcaaaccacgtgtcctgttacaagttcgagaaacctaaactcacgtcgaaattagcaacagaaagacattcaggtcaaatcccagacaggctcccatgagagaaaaagaggataaaaagcagaagagcatccctacagaccacagaagacctcagaaacacatactcaaaacagcaggtaaacagcaaatcacgccttaagagaaatggaagccaaaaaggacaaaaaagataattttttaaaaaagagaaaaattaggccaggcacaatggctcacacctgtaatcccagcactttgggaggctgagacgggcaaatcacttgaggtctggagtttgagaccagcctggccaacatggtgaaaccctgtctctactaaaaatacaaaaaaattagctgggtgtggtggtgcacacctgtaatcccagctactcaggaggctgaggcagaagaaaaccaggaggcagaggttgccatgagctgagatcacaccgagatagagccactgcactccagcctgggtgacagagggagactctgtctcaaaaaataaaaattaaaaaaaaagagagagagaaattaggctggacacaagtggctcagcagcatttagggaggccaatgtgggaggactgcttgaaccctggaggtcgaggctgcagtgagctgtgatcacaccactgcactccagcatgggtgagagagaccctgtctctaaaaaaccaaaaaacaaaaaaaaagagagagagagattttaaaaattaagagactgtaaaaagtgctccagcaggcaaagaagatacaacacgtggaaaatgggactctctgaagaaagaaacaaaagaacagaacaaacacaaaggatcattattgcagatgttcctaaggagacttgaaccgcactgaaagaacacagccagtactgagaacaccaccccagcacaaccaagcccagcacgcactccagtgggatgagccggcttccgagaaaaaggacacccagggaagaaaaacacgtggcctacaggaggtaaaatgaggctctcattagatttggacagtaacactttagggaggaaataatccagagtaacatccttaagacacttcagtaaatacaacgtgagccaaaaaacagaccttcaggtacaaagggcacaaactcatcagcaggtgggaacttgggagtggctgctcccatgaagcgttccaaaagaatctagcagagaatgagatttggaaaaatcaaaatgactacagagacacaacataaagacgagtcacggcattaaacatgtcattatttatggcactaaaactcaaagagggcgaaagggagagcttatggtgtgtaacagctaaatgtttcgacaacataaatacagcacaaaatacaaaacggggccaagggagaaagcacatgaacaactttcggctgttttcaccaccctcggcaggagtgcccatattcttattctcaggctatgtccaaaggtaggagatattttaattctattatctcctatgtccataaccaggatccttttattttaatctctccttctcctgccctcccctccaattccccaccccccaagcccttggggcagccaagagccagaattcttactgtgaagataaagacgtcattttgaacatggtaactcctacacctctgaatttgaactacctgaattggaaatacccatataagcccatgagaccatgttttacacacatttcccagtgctgtccactgaaaaggccaacccaccccagcagcaatgacatccctagtcccagcgagtggtcttcaaacgccatttcccactagaagaaaccagttcttggagaaatgactttttcggtctgaaacaggaaaggtgtaaggtgagcctgacacatgttaacgtccagacggcaaggacatcagccccacgtcccagcgtgactcaggaaccaacctggagatgcttccattggccaaagatggcacagtctgaactgcaaccaaaatgagaactgtaatagatggattatgtgcaagtccttgagatcacaacggtaaaaaataaaaacaacacactaaaacgtaaaactactggtcaccctctgagggtgacaacctgttgatccattatcttcacctggatatatggaagaaaacatgctcgcgtttaccctgcgtctcctctatgagctggacccaccaagcggccaaacagtagtggaggaagagtctccaaaagaacaccccaaagaggaagtgagaaggaactcacagactaagagcaccgccatctccaacctcaagggactagtggccctaggcatgaagcatgaccagccaccgtccccggggcgcacagcccagacccgtgtcctcgcaatgaggggacacaagagcagccagcgtcctgccgcagggaggcagccagagttggaggagtctctgggtccagccaccaacgcgcaggaagttcagaggagggaggaacaggcagaactgcaccacaagggcaccgccagcaatcctgacgcaggacacaccccaggccaaacgacctggtccttcaaccgacaagttgtaagaaaaagaaagtgatggaggggtgggagggccctacagatttttaaaaatgttaaattctggtttccttttaagtcaagtttaatgggaaaggacggcaaggctaaccagtgtctcgctgcacaactggggactggcaggtcctggcgtttcttcctggctttgccataaagtcagggcagcagttacttttggagggaggtaaaagcagctgtgatgtggtggggcacataaaagggtgggggatctcccaggtgactggcatgttctagtttggtttttttgtttgttttttgtttttgagatggagtctcgctctgtcacccaggctagagtgcagtggcacaatctcagctcactgcaacctccgcctccagggttcaagtgattctcctgcctcagcctcccgagtagctggaaatacaggtgcctaccaccacgcccggctaaattttgtgtttttagtagagacagggtttcaccatcttggccaggctggtctcgaactcctgacctcatgatccacccgcctcggcctcccaaagtgctgggattacaacgttctagttctcgaactgatgatgggctacaaaatctatgcctttgagaattcagttaaccataaaagaaatccaggaaaaaaaaaaaaggctaatcaatatctttcacctcccccacaaaaaagtaagtccttaactctaagtgctcttctcgatatatgttgttgttgttcagaatttcagttctttcttggtatacaactacattttcagcgtgggctgcgggcctcacagccagtgggcactcaggcctaggcccaggtgagtgcaggttcctgctggggcccatcccgggccaagactcccagccacacagtggccagagcccgtgttagccttgggaatctgtacttacttacttatttctggcccagagaagaatccccctattttatctatatctcacacacgcatttataaagacaagatctttattttcttcctacattgtaccagacattttaacctgtactgtcccaggagggatttctctgaacctctgggatgccatattgccaaaactctagtgtctgttacacctggagtccctcctctccacaccaggcagccatttctcagaggtcactgctagcatgtgggcaggcgagccccagcacggaggtctgggacatcccacccacacatttccaacagtcctggtggggagggggagctctgtcctcatcaggtcactaccctgaccctgtcccagagtgcacctgcataccaagaagcggtgcaagaccagccaatgtgcatcagacagcagctgccacggggctgagagcgaaacagagaagtcaggggtcgggcagagtagagggcagtccagaagcatgggagtccagcctgcccgagtaacaagacctttccttgtacgtaaggatcacaccctagagtaagacctaccttagcaaagcctaaagccaaacccagacaggaaagacagagtttgcaacttgagtcccactaagttaaaggggcttgagaaacaccttgaggtttccccagatccttactgacaaaatgaaaaacaaaaccacacaaactcaagatggtcagccagtaactcaaccgcctgcaagaatcaactcttcaagggagatcacagagtccagtctcttggcaggtaagcatgagacatgcaaggagacaagaaagtgtgcaaggccgaggaaaacagcagtcgagagaaactgaatgtgagatggcccaggtgttgaacttgacaaaaaccttataaaacagctttaataataagctcaaagaattaggggaaatataaactgtaaaaaagaactagatggaaatcttagaattgcaaaataagttaacaaaatggaaacttcaactggagatggcagaaatccatctgccaaggacctcgtagacacatcagtagacatcttccagtctggaaaacaaagagaagacagactgaagtccaggaacacaggctcaaagacctgcagggcagcatcaacaggtctaacatacatgtaactggagccccagcagaagaaagtaagattgaaatggaaaaaaaaatttgagccgggcgcggtggctcacgcctgtaatcccagcactttgggaggccgaggcgggtggatcatgaggtcaggagatcgagaccatcctggctaacaaggtgaaaccccgtctctactaaaaatacaaaaaattagccgggcgcggtggcgggcgcctgtagtcccagctactggggaggctgaggcaggagaatggcgtgaacccgggaagcggagcttgcagtgagccgagattgcgccactgcagtccgcagtccggcctgggcgacagagcgagactccgtctcaaaaaaaaaaaaaaaaaaaaaaaaaaatttgaagaagtattagccaaaatgttccaaatttgatgaaagacactgacctacagatctgtgaagttcagagaacctgaaacaggctgaatatcctgagaaccacagcaaaacacaacacagacaaacctctaaactgaatatccagagaaccacagcaaaacacaacacagacaaacctctaaaaaataaagaacatctcaaaacaaagattgaaagtcatgccagagacatgaagcataccacgtacagggaacaagcttaaaaattatagcaggaccagcccatgctacatggtgagaccctgtctctacgaaaaaaaaagaaactacaaaattagccaggcatggtggcacgcacctgtagtcccagctactcgggaagctgaggcaggaggatcacctgagcccggggatgtcgaggctacagtgagccatgatcgtaccactgcactccagcctaggtgacacagtgagaccctgcgtctaaaaaaattaaaaattaaaaattacagcaggacatcagaagacagtggaacaaggtcttgaaagtttcgcaagaaagaaaaaatcagcccagaattttgtaaccagtaaaaatatcctctgaaaatgagggtgaaggccaggcgtggtggctcatgcctgtaatcccagcactttgggaggccgaggtgggcagatcatgagatcaagagatcgagaccatcctggccaacatggtgaaaccccgtctctcctaaaaatacagaaattagcagggcgtggtggcacacgtctatagtcccagctactcgggaggctgaggcaggagaactgcttgaacctggcaggcggaggttgcagtgagccaacatcacgccactgcgctcccacctggcgacagagcaagactgtctcaaaaaaaaaaaaaaaaaagagaatgagggtgaaatacaatttttcaagtaaacaaaaccagagaatccatcaccagtagatctgcaccacaagaaatcccaacagctctccttcaagccaaaaggaaatggtggcagacggaaacagacccacgggaaggaatgaagagtaccggagatggcaaataaggagggaaacataaaagaccgttttctttcttcctgtaatttacttaaaaaaaaacaactgacagttgaaagcaaaaataacatgtcaaggctgggtttataattattagactaaaagatacaaccacaaacatagacgagaaactaatggaatttggagaaacagcagcgggcagcaattcttccccttcattccacgaactgtccattctcctacagcagcttatcccacagacactgtgcaggaagcacaatcagcaagatccctattcggatcattcttctgacagttataacttccccacatccttttcaaatccagcctaaacctcatcacagtaatcaaacttcctcacgaaaaagactttcagctcaagtgatagccacaaataagctgatttggatttaaaatgtcaaacgtaaaacaaatactccagaaaaggtgagacaaaatgtaaatggtaagaaagcaaattcccctatgtgtgtccgtcccctagaagagggtggctctaagatgttccccatgtttcccccaggacctcgatcccacaacactgccgtacctctgctcctgagcccggccccggacagtccactttcctctttttcctgggcccgatcgctgctagtgctgtgaggttggcgtcccgctgtctcatttgtgccagttcctgttgctgcatcttttattttgaaaaggagacaaggagcatcatttcttgcatgttttttacttactacaaaagtaatacatagatatgaaagggttttctgtagttttctaaatcataacttctttaatgttttgactttctcaatagtaagcatattctataatccaaaaaataagattttttttaatgcaacagatgtttgtcttaaaactctcagaaaatatacgcaagtcaaaagcacagagactaatgccccccgcaaagggaagtcaccgttgaatttaaaagtaggacaccaactgtttgcacaggaaaatacctctgatgttgtatttatttaaacttggcaaacattttaaacagacacgcaaatgcctatcgtacagaagtgccacggtttccttagcccccctcccgtggggcgctacagtgcacagcaaagtgcccacgagcactcacgactaacagggctcacctcctttgccttctgtttcagccttaactgttctggatcttcttgtcttgaccgagactatttttgaaagaggcagaaaagaaaagtaagttatgaactaaatgtttatcatttaacaaatgtgttatcttatttactatacaataacatctaggtaatgttaaagaatgcatagcaaatttgtgaaatgcttatagccaaagatgaaaatttacatcacacaccatgaaaaaagccagtaatcttgagaaaagtcagtaacatttggatgtaagatacagtctttgaaacacatctaccaatcgcaggctctgacttgacctgatgtgaccgcatgatggcaggcagaatgggcctcataggctccttgctgtcctgtcccacacaccagggacgggacagcctgtggctgtgatcaaagcaagtgctcctcccactccacagtacccacccccgtccctggggaactgtggtctcctgtctgattctattaatgagcagtgcctcgcctggctgtgaatgttctagaacaaggacaacgtgagtgtgaagagtccagtccagcgcacacagggggctctaggaacatgtgcttcacacctgggtgtgactgtgtggagcgtgaggtgctgggaatcttaagaagccccgcttttcaagcatctacgctagtgccaaatgaatgaggcttctctttgcagctccactgacagcacccatcacctttgcttcaaggccagcccaaaacatgctctgaccacccaaaaccccactgtctcagtgagctcatcaggttgtggctgagacggaggtgcccagacggcagcagcagacacccagcactcgcctttgctgccctcatcaggatctcccgctcctgctcatccttcctctgcttttcgatttgatcaagctgttcaaaaaacttgagctgtgcccggacgtcactcgcctgctcatatctgtcgtcatcctatgaagaaagttaaaatactgcttgtcataaatctgagagcccagcaagcaaaggggttgtctagcaccactggaccatccgtgcacaacgccctccctccgtccagtctgaatgcggcgaggacccgatccctcccaccctgcaaatgctgcgcccgagagctctatcgatgctcacgtccacagaacgaagtctcgtgttggctgtctcaggggcacacttgtgggagagtgtcccttttatacactttgatgctgtcagatttcttaaagtaacatttaccttttttgctgcaacacagaactacttttacagcaagggctaagtgtgtttatttcagtgctgccctgaaggcactgcctcccggctgtggcagcaggcaccacctcacccagtgtgcccttggaagagtgttcatatgtgactgctggtgaggaaggcacgttttacttggaagagctgcttcatgagaatagggctgcggcacctcagggtctgccagttcagcccatggcccagagagagaggcaggtgccttccaaaaggtaaacccgccaggcatagaggctcatgcctgtaatcccagcatttaaggaggccaagtcaggaggatcacttgaggcaaggagtttaggaccagcctgggctacatcgcgagtccctgtcccttttattaaaaatacaaaaattagttgggcacggtggtgtgcgcctgtaatcccagctacttgggaggcgaaggcacaagaatcgcttgaacccacgaggcggaggctgcagtgagccaagactgcgccactgaactccagcctgggcaacagagtgagaccctacctcaaaaagaaatctttccaaaatctagtcctataagaaatccaaaacacgttcgtaaggaacatggaggcacttgggacccaccgccctctgcctcggtgtggggaggaggctcccagccagcagagagtgggggccaacaacataaagacgctctcctcggcaaacagcctgttaccttgtaagaaaagttcttctgctgagctgtttctgatattttctctacaagattctgtagcctttgttgcgtggcatgtgatacataacttactacatctggatgtaattccgttataccatgttttttacctaaaggtcaggcaagaaaaacagtattttaaaatcattaagcacagttctttctttacggctaatctctgatccagcagttactgcttttatacaacccaaggggagcccagaaaggctggtggggtggaaggcagtggtacccatattttacccaagaaccaccaccagcaaccatgtggaaatcacaaactcagacaaaacacatgaccaggtgtcaggtgtgctcacctgaagctcccatgccccagcagcgcagctgtttaataagaactcagtcattaaacaccaacgtacctatttctaatattcttctctgcaaaggcgcttggaggaggaaggtttcatctttacaggaccgcgttagcgtgcccaccaattcagagttcgtggctaatattcttgcactttcttctgacaagtttactccagccatcgatgcaacatcattaatgtcatcatcgtcccttgaggaaagaagggaagatcactttaactgtacaaggaattcatcgggaggtgggctggggtggtaagggcaggaaaccccacgtggaaggcagggccgtgaggaggccaggcctctgtcctccccgcacctgcacctgctgcatctgccacagcagagagggtgcctcgctgctttcctggaaagctcgattgttctgcggaaggagagctgtgagttggcgccgggttaacatctacacacagatgcgcaggggactcaagtccagagaaagcaaagccgggagcagcgcggggacttgtgggggtctgatctatgcaaagctttttaaagccagaggcagcattaaattctttttaaaggctcagaagttggaagaagagtacgcacaattttttcctgaatcacctgaaagttgctaacctgactttcctccacccggaacattctgcacgtgtttcctacagacaagggcatcccctccagaagcaggatgccattgagaccgggccatgatgaatggcccctccccaggccctcccccgtaggacccggtcccagcagcgcctctccctgcaggacagtctgcatcccaatcccagctgccacgtcttgtccggctcctcaagctggaaggttcctcagcctctcctgactcctgggctgcccctgacacctggaaggcacaggccagctgtgtgcaggacgtcctcttccaggctgacttcggccccctcgtgaggagatgtgagctaagagtcctgccgggaattccacatgcacgcagcctccacttgccgcctccagcagtgggctttgaacgtgaggccgggggcctgcctggcgtctcctggggtcgttgtgtctcggggaagagctctacagcagttctcatgcccagtcctcctatgggctccaggtgctcactcagggtcttggcatccctggtggtcacgggctgtggctgggctgcacagcttagggctccagctgaaggacccggccatgggagggaggctgctctgctgacatccacgtccacgtcatgcccatgtccactgctctctgacacaggacggtctccgctcatcttgtatttccttatcccagtcccgcaatcagccttttctctcaggagtccttgtcattttagtggaaaacggtttttagaagacaacatctgaacactaggtgtgctcagtgttactggggcgttactgttcccaggaccctgcggtgaacaaagctagaaacttacggcaagacccatggttatccatgcctgccgacacactgaaacccaggggtttgcgtcagcattccaatcctgagccagcccacaggggtcactctcctttatcccttctgccaggccgctgactccttgacagcaaaataccaaggcttcctgcagccttgattaattctttcacccgtgtatgtccctaagtgccctcccttctcactgaagtatcagcgtcacgctgggcccaggcatgctggccacctctccctgcttgggctgggactctggctcaggccacagccactccccaggcctgctatgccctgcctgatgcctttagggatgaagtgtctgggaaagggaaaattcacagtaagacttcctgaaatacacacaactccaccgccccttgatcacaacagagatcactccaagactctcccactgctcaggtcccataagcacctccctgactgaggtgatgctcagaccacctgctttccaggaggcccaggcaaagcacagcagttatttttctagaaacagggcctcactctgtcaccgacgctggcgtacactgctaaaaccatagctcactgtaacactgaactcctgggcagaagtgatcctcctgcctcagcctcccaagtagctaggcccacaggcacacaccaccaagcctggctaattttttattttttgttgttgttgagtaaggttttactatgttgtgcaggctggtctcaaactcccgggctcaagcgattctcccacttcagcctcctgtagtgctggcactgtaagcgtgagccactacgcctggagcagtacagcatttctgagggttctgaagttgaatacatggaaagtgaagcattctatactaggaatgcaatgaactcaaaatacgatgttatactaaaaaatgaatttcctattagttcatataaaaataatcagttgattcgctttctggctatgtgtatgaagcaaaacctctttgagccaactgtatgggaaaacacacttgtgtgaacgtgaggtcaaagtgagcgtgaagcaggagccttggagccccggccgccagggccacgtgggaaagacccgtgggcgggaatggagcagcacggactctggactcttctccgctctggccacgcttctccaacgtacacaggcccattccttaccgaaacgaacctcccccaggctccttgagtttatttttctgtgcagcagctgcttgtgccgagacagcagaaagggctttggttccaggtaacacggcgggtttcaccacagggactacaaaacaaacacacagtggaaaccacacaaggcttttattagatcaactatgtgctttggtgctttacaggctcaagggcacagctaccactctcctaattagctacaagaaagtttccaaaaacttcatattaataactctaaattacagtacaaagtgtaagctgtacctctcgagcatttattttcctgtatttcatcaaggtttttaaagtgcaggaatgattacagataaagaagctaaccatggaaaatacataaaattaaaaatcatactgacagtggtgatggttacacaacacagtaaatgaaatcagtgccactgaactagatacttaaaatggccaattttatgtaaatgtacattttacccaattaaataaaagcccaatggcagctggctctgggagcagcccttggtgttgagcggccaggggcccgcgaggccctcacctggctgcagtgggttcagctggatctgctgaggcgtggtgagcatgatccggttgtgaggctgccgcagggcgaccatgggtgtctgcgtcaacgtcacctgcgggggccggatcagggctcctggcttcggaggctgctggatgacctgaggcagagccagcagagaatggtgagcatgctccccgagggccaggggccactcagtccctagcaggaggttcttcccttcccttcctttgcaccccacgcccccagtaagaagtcctaggaagaccccgtgtgcagctcagccccagcaggctgcaggaccatgctctggccatggactcggccagaccagggcaggacgtgggcgaggggtgcccgtgtgagcacagaaggggcaagcgggagcagatctgctgcctagaagctgcccctgggcattggtcagggcctggagggggcgggtggcaaactgatgcctgctgacctcagcaacccaggatggagcagaccactgccccccaaatattagcagaggtgacattgttgcctggtggctacaggtcaagtggttctatctcatctgaattttcttttttcttttcttttctttttttttttttttttgagacaagtctcgctctgtcgcccaggctggagtgtagtggcatgatctcggttcactgcaacctctgccttccgggctcaagtgatcttacacctcagcttcccgagcacctgggaccataggcacccaccatgtctggctaatttttgtaattttttttttgtagagatggggtttcaccacattggccaggttggtcttgaactcctaggctcaagcgatcctcccactttgacctcccaaagtgctgaattacaggcatgagctaccaaacccagctccctttctgaattttctgtaaggcggctgagggcttttctactggagtggggttagagttcctaagtcctgcctgaacttggccctcaagggcctccacccactgctcccagcatggccagctctgtccgcccagcccctgctgggcccctcgtggcagggtctgcccagctctgctgtcatcctgcctctcactctcacctccggcacaaggcagagatccaaaacctggcagcactgaccatggcctatgctctggccctgtccccaggatgctggggcctagagacactggcatccttgtcaaaagccaatgctcaagtccataaggcctggcctcaaacctctgggcccaggtgcttcagaatttagtcgctaccattttgcaaaggtgccctggcaggtaaactctatgctgcagaacatgtgtggggacctggggaagcggcctataatgcaaacatgtctccaacgaaacaggaacacccacactggacaggaagagcctcaggcagctcaggcaatgctcaggccaggccctgcggcgcagggaacctgccatcaaatgcccgggccaggccctgcggtgcagggagcctgtcatcgaatcagggagaagcctgggttctgcctccacaggcttcagggtgcaggcaatggattggatgccctggatcccactggctgtgctctgcagactcacacgtggtcaggaggagcccagggaagcagaatgcagaggtgatcctgctgccaaacacagcacctaattctaaaaacacccatgctgcttgtgtgtgactaagcaccagaggtcaaaacttggcaagaaaatgattgcccacaggctgtgcctgcttaaacagaacccacctttttgggtaaagtagctccactgactagtgaacagggaagttctgtccttacactaaagcaagaggcacggcacatctctttccctctggagtcaaaaggcaggcaaggaagccctctctttacacaggcgctcagcccttccctggcctttataagggacaccctccctccatgccatttcaccctgttctcctcgctattatcaagacaaaaacaaatgcaacttgaacagagcacaagagccagccccctaatggctactcctcacccagctggttctgatgtgtacaccatcacaacacataccagctcatgatgagggagcccgcaccattttgttgtttaagctgtctttagaggaagaaaacacctctgaaatttttttaaaactgcccctctacgtttggtgaatccctctgcccatgaaagggaatgtgctcaaaatgtaattcttctggcaaagacatcctttctctagctgcagagcaaacgtcatgactataaaaccaagaaagccagatccaaactgcacataagtgaaccgctatgagcagccgcggcttcgcctcccgggactcacctaaatccaccctgtgctgtgagctgctaccctgcctccagtctcctgcccacctgtcccacgcaggtgcccgtgtcttacgcttggaccgctgctcctaatccaagagaacatctatctacaagatcctctaaaagcacgctgcattcatttacaccagtaacatccccagacaaggcagggcggggacgtgccggtggttcaaagccaactcaactatttcattttactgagacaaaatacaacatcccagggcctcaacctctggtttctattttaactatttaaggtaatacccaagcttcctctagcaggaggcttcctgcatgcttggaaaaggtttctgagccgtggccaatttatctaagaagcgggcgggagcagaggcacggtgggctgtgcagaccagtcaggcgccccttccataccagcggtgtgggttgcccctgcttgccgacgccgacctgcgtgggctgcgtgaggctgagcacagggggctggagggcactggtcacggtggccgccgtcttcccggccgtgcgctggaccgagctactcagcaccacggccgtgagcgcagtggtggcctgcgaggtgggcggtggcggctgctgctggctctgctggatgaaggccgcggagtcgggggtcagctgtctcaaggcgggtaagctcctctgggtggaaagacagacacgaggggtcaggcggctgctcatgcgtcggttttccttgcttaaaaattcagaaatatcaacttttacagaaagcttttgagctaagtaagatggatcttggccctcacggcagcatgtctggatgtcaagggccaggaccccatcctgccctcccactaagtgggattattcctgatagcaaatgtccaaaatgtgttcaagaaaacaaacaaaaagagacatatttttaaaaaactttttaaaatatgttaacatcactggaagagaagattctgaatgttcccaacacatggaaataagtactcaaggtgacagaccccaaatatcctgattctatctatgactgtaacaaaacatcacatacacctcataaatgtgtacaaatatacgtattgatttttaaaatgtgctgataccaatgattacccaacagagacagcctgacgctgttgaaacccttggtcctatccagttttgcaaacgctaccccattccccgtccccttcactttcaggaagcacacgcccttctcaccaccttgcgcacgacagaaccacaaggccaccgtgtcaggggagctcctgctttacagaaaaaaaactaacattctgtccccaggcactgagtccccggccccacccccgtaggcagcacaagcgctgtgcaccctccgtgcctggagcatcctcgccctgcacacttggtgcatctgcgccccacccctccctggccctactgctcgcaggcaccggggcctttgaaattaccttcaggaaaggcacaaggtaaggttgaggtgaagaattaagttctcggtataacctgcttgtgaaatcttctgcttctatttttccatccttaaaaataaaatccatgttgaaattctggtgaatgagattccacacacacttctgaatcccgcatcactctggtctcgtattttacggctgattccgccccgagtttcactggacagaggagatgggaaagtctgcgtgctacacctttcacaggtacatgtgtgacaggcgctcaccctggacactgcagtgcagccagctgcggaccacgtctcctcctgggagggtcacctgtctacttctcgtctttttctaagtctcttactcaatgccagtctttactcagtgcttaccaggcacctactcggtgtcaggcattttgctaggaggcagatcagcctaaaagtaactccattatcaaagccagcactgcaagtgcggtgctgcaggaggtcacagcgtgccaggggccacacagacaggatccacacagtcagggcatccgcgccttcaggagcagatgacagctgtgctcacccctgcaagcggccagggtgcccagagtctacagtcagacaaaagggagcccagagcaagagggccagatcctgtttcagaaacagaggccagtgtggaataaaggtcgggaagacaggcgacaaggcgggaaggcggtgcctggactgaaccctaagagactccggaagacatggtcaggcggacaaggagaaggcacggtaagaccagccactccagatccccaggccatcccactgacgccagcacagccctgagccacgagacagccatgaggctgaggaaggtggacagccgagagctcggccatgagtggagatctggagcttgggactgtgggttaaggagaggggaggctgccaggaatcctccctcccaccttccggccaggggacagagtgctgttctctgcgacagaggtttcgggaggggtgggggtgggggggacggctctgccactggagcgcgaatgtgcctcagctggtctgctccatggggagggggcttctggtggctcagggtgcagaatgcctgttccagccgggactgcggacacctgggaattttataagaggtcacacaggagtggggagagggccagaagggagttgctggagaccctgaccagagtgcagcatggttggggcagccagaggagaagagagccacagacaagggacgcaggcaccagaaaacggcaaagcccgggagacctccaggcgccggccccagaacacccagccccaggaaggagtctccttagctaggccacacacgccttcgacacgtgtgcacccctccccttcgcctgcagccttccagaggagctctccctgctggcacaggcctcccgggcacaggtcacagcagcaacaggtgtctgtcctatgcaacaggctttaggggaaagggaatgtaaagtcaaggtttctcaccagtaaattctgcacgagctctttcacattagctgctgtctctgtagactgcttgccagatgaagccagttttattaacgtagataggaaatttttacatttcttcacgttttccatagtttcctggattaaagtaaaaagatataagtgaaaaatcttaaaaggcagatttttgtcacagcctttggttactaaaatatgcatatgtacaaaagatacatatatttcttctctaaacttctttcaagaaaacgcaccacctcttggaaccctgggccatggggcaggccagccacatcagtcacatggccaccgaagtcagcatctccctcagccccgcaaggccacatctaggaatgcagctatgcaaataattaaaaaagtgaaaagagactctgcgaagatgcctgctacaatgttgctgaccataaggacaacctatgccaatccaaacggacacagaaggaaccaaataggatgcggtcactaaagcaacgaaaagtacgcagcaaagaaacaccaaaaaggcgtcaagtggggcccactgtttaaagatgtctatcgatacaggccgacactgtgtgtacaaacgggtggcgctgctgttttacacactgaacacaacagttcaccagtgactcttctgttttaataaagatgtgtatcgatacaggccgacactacgagtgtgtacaaacgggtggcgctgctgttttacatacaacgcgacagtgcaccagtgactttttcaaaggcaggtgtttgggcttttgctgtttgcagacttctgcggtctaaggccctcggagcccacctcacacagcacagcagcagagccccacgtgctcacgtgggccccagactgttcactgctttgtgaagcaagcagtgagcggtctgggacagaagccggcctgaggtctcaaggctgcattttctgacctgcgccacgggcctgaccgtctttgaaggcacggaaaggagtggctcttaccgtggcagctgaggaagtggtggtcgcccctggtaccgtgcgctgaggagtccccgtctgaacagccgtcgccgtcccaagtgaagccgtctgggcagcgccacccagaacgagctgaggctacaagaatccaaaaacacaaggtaagggcatctcacgccaccagctgacgagggggagaccagcctcacgcccagcaaaagaaaacaagcctccctgcggtggccaggacgcccaggaagccaaggaccccggccacctgccagcccgctggacacgggagtgctgctgggaggcctgccctgtgccctgacgatcgcagtcctgagcgggtgaggaaggcatgatttgcacctgcatcaaaaacggacgttcacaaagccaggcactgcagagaccccagtcctcagaagtccatggaaaaagtcacatagagaccagagtaaataatcctaacaggcaacccagatccccatctctcagaaatcaaaacaacaaacagaagaacggctcctgaaagctccatcctcccaggtgcagaggctggctacagggcggtcagggctccacagccgcagcctcccataggggagggtccccagctccctgcaatcacccaaacccacctttctttactccccaaaagtgagtgtcaacaagaagcctcccacagaggggagttttcagagcagattcgagcaatggaggatgggtcatcagtgtcaaactgtcagaaaggaggggctgctttgctaagcaaatgaacagccagacgccaaaaggtagctcagacaactcagtggcctgtactcgattcctaacatttccattctacatgaataatcagaatgcaaatgtttactgatattttaaactagtacttttccaatgtataaatctagcagtcaacattttctgtctccaattttttaaacactcctttgcaacttctgaaagcagggggcagtgtaagcctgagaatggctccggagcagcgagctctctcccggtgggtgcagccccgccagcacgtgggaagcaactctgaaccagccccgcttccagaggggtgcggatgggctgtgaggaggcagcagggtggagggactgtttctaagtctgtgtatcttttcacttgtaacaataagcatggattttttttttaactgaaaaacatcaaataaaaacctccagtgaagaaaacataaaaggacacaccaagctgctgcttctggaccctgggagtacccaggacccacctcatcttttgggagtcttctttcccatcaaaactgactcctcacacttacttccactcctaagaacacatatttcactcagatgatatccagattgtgtctgccactaagtataatgcaaaaacttaaccataagctccaactaccttctcaaaaaagtcactgtaaccaaaaatccagacgcaccaatcagagcacaggactgagcaagctccttcagggaaaacaccaagggcggggcctgcaccaaaggccagcacacatctccctggtactgaaccgcccttccacccactttcacccactgcagctgcagccagccaggacatgacccagtgagggtagaagagccggggttgcggggggagctgcccctggagtccacaccccctggggctcagcctccatttcaccactgagcaatgggaaaagggcctgtggcactgaggcaaggactctggatctctctgcagagcgtccaggcccactgcctggctcatggcaggtgcttcaccagcagcgaccaacaccatagagacctacgcatccacggatgctcacagacaccaggtgaccaagaaaaacccctgaaccatttttctcccagctgcttcctgctgactgcccagagaaagctgcttccctcaccaggtgcgtctgaccggccagccccttcccctccacacacctccgccaccccttccagaacagcctggcctgcacacaaacccttctgggatctgcaggccaaaggctgagctgtcaggagcatcagcaccactaggagaggggccagcacctgctctgggacacgctcctctctgcagatgaaaacgctgttctagaaaccagcggccaccagggtggatacagaacccttctagaacgatgctctcactacagacgagggatgtgagcggcaggtggcagcgtggcgtggcaggcaccgtgcaggtggcatggccgggagtgagtcccagagcctcccttgcctcagtgtaagcgccgcaccacgagatgaagggagcgatgtcatctgcttcccagggtgcggtgaaagttacggtccatgtgcctgcaacagtgagagcgacgcctcggccacgttcaccttagcgacagccgccgtcctcaagttacacacaaggccacatgtgcacacacacactgtcctcaccgcaggctgcttctgcttcagacatgccttatgatcaagtactagtaaggacatagttttaatgcttccaacatggtggaaagcttgaacagtgctgctggtgttaaattctgtgtgactaaaaaaaagaaaaaagaaaaaaagaaatcctgacttatcccatgttggtggtcaaagaaaaagcactttcttcacagagaaccttcctccccagatttgacgtagtatccagtttaaaaaaaaaaaaaaactcctaaggcctgatctctgcatcaaagaaatcacacttcgtggcccctgcagcctcaagagatccgccgcctgccctctcacctggacgccgggcgagcgctgcagggttgcactgggctgcaccgttgtctgggcctgagacacttgcttaattatggtagttggggtcacctgccgtgcaatgataggtgttccaggtgcctgaaaaataagcagagtcacctaaaacgagcgcaagtaaaaggaattcccacccccaggtacacagaaattattccttccatatgtaactagtatatccaagtgggtcccaggcttatccgtgatctgcaatgaagccactgtaattctaaagttttcttaccaaagaacaagtgtatgacaaacattttcctatactacaataaacatatcattaggcttcttaacagagtctacaaaaggtcatctctgaagaacgcaggtatctagaaatcaatcctcgtgctgctggcttgtgacctcgttaacaatcactaaaaaggatgcaaaggcagacggccagtcagtgtcgcaaaggggtagggaggtggccgcccctaggctagatggccagtcagtgccagagaggggaaggaaggtggctgcccaggacagagggacgccacaagtcctgagcccatgaagtttgtcggagagagactgacatggaaagagcagatggcagactgcaatgggatgcccacagtgcaagtgaagccacgagtgtcttccacagtgtcccactcagcagacagatgctgcagacttgaggacaccgttctgtgctacttcagatctgggtggtctctggcagcctccggcacgtccgtccacgtccctgtctatgggacagaggcacaactccagagggtacgcagctcacgtagcaggagaaggatgctgatcaagtcattccagtcttcacaaacctgccaggtcattcagagcagcagcatcacagtgccagggaaacacggcaggagacggggcaggaacacgcagcgtgcgggcacgtgcaggtgacagtcatggggccagacacagacacacgccgggagaggcaagtcctgggcactctgccctccaagtcagaatccgtgctccctaccacagctcaggggtcgggagcttcggccctgaaggctgacgcgggtgtgtgtgtgtgtgtgtgtgtgtgtgtgtgtgtgtgtgtgtgtgaatccgtgctccctaccacagctcaggagtcgggagcttcggccctgaaggctgacgcgggggtgtgggtgtgtgtgtgtgtgtgtgtgtgtgtatgtgtgtgtgtgtgtgtgtccctctggcaccccctaacagcagcagccaaccccactcgcacacagcggctccaggactcttggtgccttaaaagtctccatgcggcgctggtggcggtcctgccagtggagtcctagcaccatctctactttgcagatgaggggacaggcacaggaaggtgaagccacagggagagaagggaaggggccagagcggccaaccctggactgctcactttgaccccactcggcccgccctgcagtgggctgcgggagctggtgtctctgagacaggcacagccctgccaccgagaggaggacaggagagcagcgccgtcccgggcccatcctagatgggacggatgggactgggacgccgcccacacttcccagtcctcactcccatggctgtgcctggcccttgcaggtttccccagcatgcgtggggagaggggctgggcagggaaggggttcgcactccagggcacacgtgcactcacctgtacggtggagatctggacgggaggggcacttgtgggggtggcagggcgaggcgccatggtggtctgaggctgggcatgggcctgcgcctgcatctgggccaaggcctgctgaggaatcattaacaactgcccattctcacttcggacgaggaccattcctgcagacaaaggagacctggcgtcaggaacgcaaccaccccagagccatgaggaggccctggcctgacccaggggaagctgacagctgtgagaaggaaacaaaggaaatcaagtcttaaacacacgaatcccccaaactcaaaacacacttgtgagtcaagatggtatacaagacaaaaaaactgtaaaggttgttaaaaggccatggaaaaaaaatggcacctgagccttccttttatgaatgagctggacagcaaggcagtgtagcaatggcttccaccggccacaccacgtgcccccatgcccccaaccagcccatacaccccacagacatgccagtctccttgcccccacctcctgcctgtgccagggccacgtccgctgggctgggcctagagggcacaaccatgtctacggcccatactccagggtctcccagcctgctgtcctgtgacacccagacccaacagagggagggtgggccacgaggctcctcaccagaaccctcctctcgggaggcagggcagtgctgcccccacactgccctgacaaccacaacacaggcgcagatgcgacgcaacccttaggacaggagaaccatttgcccgtcatggttcttgagctaaaccacaggaaagcaaatcctgccattcaggtttggcattaatgttagcttcaaaaaacagcaaccagttatatcataaattccattagaaacagcaacacaattgtccaacttttaaatttaacttcccatgacagaggtggggatgcagccgtgggagcagggctataaacactgcactctttcccgagtgaagcctcggcagacagcccagcaccaaggagctgagaaactaaacacacgtgcaatgaggcaccgccaccggccgtccccaccacccatcacacactggccaagccacggggcacagggggcggccactgcgtttcccagcctctccttcctcccctttatggagaatgggaaatgataacctcgaaaaagatgaagtaaggcctgaaaacctcctgttggtcatgatgacaaatgagcgtggggcttcctcctcctgcgctatgacgctggggcactctcagggctgtcggctccagctctttcgaaactcagcatggtatcaagaataatggtgatgcctctcctgggctaacatctaaaattcttgatccaaaaagccacatttatgcccattaagaaaacttccccccaaaacgcccctttcaaaataaaccatgctgaaatcaaacaaaaaccaaacacccagctgcagcaaataacctgctggaatctccaagcctggagctcgggaacgaagtaacaggaaaggcctccaaggctccgtctccgagtctgtgcccacagtgcccaaggacagccttcaaagccaggtgggcactcatcagccatgtggccgccagagctgctgcgcgtaacgagggagagttccactctcacccaagcacactcggcgcctggggaccccaaaacaagacacctggtaaatacccccatgtatgtggttattatggagtgtcaacttgattgaagaatgcaaagtattgttcctgggtgtgtttgtgagggtgttgccaaagaaggttaacatttgagtcagcggactggaagaggcagacccagcgtcaatgtggctgggcaccatctaatcagctgccagcgtggctagaataaagcaggcagaggaacgtggaaggactggactggctgagtcctccggcctccatctttctccagagctggatgcttcctgccctggaacttcagactccaagttcttcagcttttagactcctggccttacaccagtggtttgccaggggttctcaggcctttggccacagactgaaggctgcactgtcggcttccctacttttgagatctggggactcagactggcttccgggctcctcaggtgcacacagcctattgagggacttcaccttgtgatcctgagagtcaattctcctaataaactccccttcatagattcatctctcctattagttctgtccctttagagtacgctaatacaatgtcctcaaacccaacacttcattcactgcattcggagacaccttgctcctcctcctcaagaattctgagaagccagggtgagtgtggtggctcacacctgaaatccagcactttaggaggccaagatggagggatcacttgaggctggttcgagaccagactgggcaatatagtgagaccccatctttgcaaaaaaaaaatttttttttaattagccaggcgtggtggcacacctgtagttccagctacttgggaggctagggtgggaggatcatctgagtccaggagctggaagctgcagtgggctaccatcgcatcatcacactccagcctggaccacagagtgagaccccatctcctaaaaacaaaaaaaaaaaatgtttttaaggaattctgagaagccaataatggacgcagacttaagtgcacacatgggaatgggacggaaacaggacaaaggaggcttcagtgtccgtcccagtgcctccacacccaatgtcaaacctgacattctcatagtgagtgaagagactttaattatcaggagctttgtgctttaaaaaattgcatccaaggccaggcacggtggctcacgcctgtaatcccagcactttgggaggccaaggcgggtagatcacgaggtcaggagatagagaccatcctggctaacacggtgaaaccccatctctactaaaaatacaaaaaaaaaaaaaaattagccaggcatggtggcgggcccctgtagtcccagctacttgggaggctgaggcaggagaatggcattaacctgggaggcagagcttgcagtgagctgagatcgtgccgctgcactccagtctaggcgacagagcgagactccgtctcaaaaaattaaaataataatttaaaaaaattgcatccaaaaaattagccaggtgtggtggtgcatgcctgtaatccagctacttcagaagctgaagcagaatcgcttgaacctgggaggcggaggttgcagtgagccgagattgcaccactgcactccagcctggacgacagagcaagagtccacctcaaaaaaaaagaaaaaaaaaagtatccagatatatttaaaggaatacgttcaaaaaaaaaagtattaacaaaatagcaatgtggttaaaattctaacaaaataaaagtggcattctggacatcacagaagtgtagggaaacagccatgggtcactgtgaaaatgtgccctgtggtcgggcccagtgtcccttgtggtcaggaaagttggagaaggaatcaaacgtcccacaagaagtgaccatgtgacttcaggcaggtacaacgtagcttctcgaggcattgaaaatatctgtgaaccaagcgcgagtggccacgtctcctaagccgaactgaggtttgcttccaacaaacagcacataagaggcgctgtcactggggactttcttgtccgcctccctggttattgtatcacagcctgactgtaccaaaaagcaaagtcagacactgtgtgatgatctgaggacactcagaacaccaacggctgcatccacgccatgtttccgagaggttctcacagttctgggtcctgtgagctctgtttacggacaaataatccagcagcatctattcacgccaaggcaaagaagtgcaactccgtctcaagacataactaatttaagagtaatcaaccgtggttacgggcggcacctgacctacgaaaggcagccgcccctcctgcctctactcctctctctgcacttgcagcagggtacacgtggcaggtgtggcccccaccccgccccacagatgggaccccaaggccagggcggagggttctgtctgagagctccccagagagagccacgtgggacactggccgtgtccccacccaggtctttgtgaggaatgcagagaggagccaaggatgacagggagcagggctctcggatacagaggcacaaccggctccacgcacccagccctcgagtcagggaggaagcagtcaaacctgcaacaagaaacacgacatccgtcccaaagaccctcagcatcctcgtccaaccaagatgggcaattccaggtggtgacgggatggggcatagccctgaaggtcattaacagttaaggtcaggaagctggggcctgggaccctgcctcctgaccgggccactgtggccaccgccgcctcccccgcaacctccccagctcacagcccctctctctgccccaccccaccttcctggagactccttcatggcacagccaaaaccccacaccagccaatgtgcacatacaaccaccacaatgggtcagggtccagctaacagaaccgcactggggcttccaattgtcctaatatcttccttaccacagaaagaagtgttcttcacagaaagtttaataagtgcagagaagtacaagaacaatggaaacctcctgaagcccctctcctggctggcacagctcaggtgccactcagtgtgcaccgtgcacttggaagccgtaaggaccacggaggccacccgcccgagttccctgccagctcccccgttccctgcccgctccccgggcgcacttcccatggcagtaaacattcttcagaaacgtaactgtccgtggctacatactatttcatccaaattgtgtttataatttccttctggtgaagatttaagctattttctatttttcattatggtgaaaatgtaggttttgaaactgaaacagtgtgaaactctccactctcccagcggttcaaggccacactgcttgaggcgggcaatgcagagccagcagtggccacgagacgcctccctggggaaggagcagcgtgcactcctccaaagcctggccagtggccagtggtgaccagtggtgaccagtgcctcccccagagccttccagggacccacgtccccagctcagcatgccgccaccgattcccacagtgtgagtgaatcccaccctccctgaggagaaacaccagggttcttaccccacacaacagttttcctgattccttttgtaggtaacacttttactgtacttgaagccaaaatgtagagcatgcgaagctgtgccacaaccacacgggcacctgcaccctgggaacccccacctgtgggggaaatgcctttgccgggtgccgcaggccgccccgcactctcagcacaaaccccggccctgggcctggggctgtggactccgccctggcctcctgaggcccagccccggctacctcttggccctgcaccacccgccctggcttggctctgtctgtggctctcctgtgtagcccaggtcaggacacatccctccacaggggtccatgttcacctctgccaaacccagggctgtgaccatcctgctatgcaagtcactccggagcatggcaccagccccagccccagcccaggacgacaggcccctgtggattctcagaggggcatttcctccctcccaacgcacaggacaggctgcaggcaccgctgtgccctctgccggtgggggggctctttctggtcctgaggggctctcagccccagctctcctcctgaggctacaggactctctggcacaagcatcaggggcacggagccaggcgctgaacagtcgcccctgccagcccacggggacacaaggtcccaaccctcagctgctgtccagctccacgtctgagccctgctggttttccttatcttctagaacgctaaactcttcatttaaaagaacatttatccaacttccccagcctttctgggtgtctggtaatgggaagctttgttaggacttctgtcccatctcaccgtcatgtcgcagctcaataccagcccctccaccagatgggcaaacagccagggaccaccagccacctgaggaaggcccagcatcaacccagacaccaaagcagtgaactgatcaaaataagcaagaaaccctcttcaaaatcacaaagattatccaatacgacagtcaaattaaaaattcctgggatgaccagacgacagcaccgaggcattccccctgaatacagtatagaaaaagagagtggaaacttggaagaacagatgagaaaatgtgaaggagcattccagaaaacacaacaggtgatcaacagaaattctaggaggacagaaaggacagcagttgctggagccagcgtgaacatgaggaaggaggcgcacaccagcctcaccacagaagccagaccactgggaaggaaagaccttccccgtgtttccaggggaaaaacacagatcccagccacagtacggggaaggagagctcagcagccctgagagctccacagaaacgggaagagatggccagcaccttcgaaaccccccgggaaattaccttccacctggaactcaacgccaggccaaaccacccaccaaggctcagaggcaaaaaaaggcatttcagacacactaggtctcaaaaaaggtatattctgtaagaagggagaagccacttaaacaagggaataagtgaagaaaacaaaagacaggatccaggaaacatgggactgaaccccaaggaaacaaggggactctcaaggatgaagcagaagggaggaacaggcatggccaggcacagggtccggagggccagggcgctggggctggccacagggcagtaagcacctgggaacccacagcccttctagctgctgagacacagctgcctgcacagggagcagaagcagcacagcacttggctcgactcaaacagcgtgttcacagccaagggccgtgcgcgcccaacgcggagtcggccagggctgcgtgggctgggccggggctctgcggactgcggctgggcagccagacggtcgctagctgacactcactcggcaacctcaggaggtggctgtacaggcagggccatgtggatacacgttccaaagtggtcccctctgagaggcagttaaaagggggtgggtgggccagcagagtttgtttctcactgaaagctctgctcttcaaaacaggcatatgattaaagttctatacttttttttttgaaacagagtctcacttaaagttttacatttttaaatatttaaaaaaagaaaaaaaaagacagccggcacctcagacggcgacagagaggcactgtgtgcagtggccgctctgtgagtgagtgcatccctggggagcagggcaggtccaaagcccgggagggcgctccgaaactcaggcacacagcggccagcggcggacagcatcagaggcggagcgggccctccaggcccgccaaggtcttagaggggcaagaacaccccaggatggacccctggggacacaaatctaagaaaatccctccctccctttcccagctgtatttataatggtatcacgaaagtgtctgcgccgtggagacctgtgcagtcaggaggtgggtgggcctgcgatggtttctgtccaggaaaacgcagaggacagctgtgctgtcagtcagctgccctgggcctcactcttcacccaagcatggagaggtgggaagggtcagggctggctgcagaataaaggcagcccctctggaaggcccagaaaacacaaacggagccaccagcaggcagcctcatccccagcagagaggagcatggtcctcaaggaataagctaccaaaagggccaaagagatgagcaaaagtggtgtttccctgcagtggaaaggggtggtctgaagcctgagggtttgcaggcccacttccctctgtaactaggacattcgaaccctctccatgctaccagctgggaccagtggtggacagaacacacgtggtgatggcccagatgtggaaagggcccctccagaatccagcgtgcgctccttacacaggctggctttctctctaagcgggtgctgtgctgtgacagatgcacagcctcatcttccttctaacctgttctggctaaagcaagtgttctctcccacctctcggggtttggcaggcataagggacggcgcaaagcagcacaggggaacatgtgctgcccggcgcaggcgctaccaccactgtaacccgaatattttgctaaaaattaaacttctgacgcagctcctggtccagcacttgcagccccccccccgcacattgcagatactattgtaaaatcatgaactttgattcatcctcccctaaaactacaaaatgctgattaaaacaaaaatgcgagcaagtgaagggacgtgcactgtgttcatgggtcaggagactcacaatagttaagatgtcaactcctcccaaactgatctgcagaagcaatgcatcccaaagtcccagcagcctcctgtgtagaaactgacaaggtgattctgaaattcatacagaaatgcaaaagtcttagattaaccaacacaactgtaaaaaaaggtcaggctggccgcagtggctcacgcctgtcatcccagcacttcaggaggccaaggcgggcagatcatttgagcccaggagttcgagaccagccaggccaacatggtgaatccctgtctctactaaaaacacaaaaaattagttgggcatggtggtgcacccctgtagtggaggctgaggcacgagaatcgcttgaaccagagaggcgaaggttgcagtgagccaagagcacaccactgcagtccagcctgggtaacagaatgagactccctctcaaaccaaacaaaccagaaaaagtcagagagctgacacgagctgatctcaagatgcattagaaagctcagcacttcggaaggccgaggcggggagactgcttgggctcaggagttcgagaccagcctggccaacatggtgaaaccctgtctctactaaaaatacaaaaattagctgggcgtggtggcgcacacctgtaatcccagctactcgccaggctgaggcaggagaatcgcttgaagccgggaggtggaggttgcagtgagccgagaccatgccactgcactccagcctgggcaacagagcaagactccatctcaaaaaaaaaaaaaaaaaaaaaaagaaagaaagaaagaaaaagaaagctccagtaatctcagggccgggctcacacctgtaatcccagcactctgggaggccaaggcaggcggatcgcctgaggtcaggagttcaagaccagcctgggaaacatggtgaagtcccatctctactaaaaatacaaaaattagacggtgtgggcacgcctgtggtcccagctactcaggaggctgaggtgggaagactgcttgagcccgggacacagagactgcagtgagccgagatcaccccactacactccaacctgggtgacacagtgagatccccgtctaaaaaaagctccagtaaccaggacagcacagtgttggtgcaaagttaaacagatcaacacggccgtgcagagtccacaagcaggcccacacgcggatggacaaaggcaattcagtggtgaggacgggcttctcacatgctggaacaactggacagacacaggcaaacccctggaccgacaccccatagtgtgtaccaacatcaactcaaaatggatccagacctaaatgtaaaacctaaaacttccagaagaaaacaggagaacatttctctgacccagggttaggcaaagaaattttagaaacaacatcagaaacgaaatgcataaaagaacaaaaggataaactggacttcatcaaaatgttaaacttcggcttttcagcagacactgctagagaatgagaagacaaggcacagaacggacagactctttagaaagcatccatctaataaagggcttggatccagaatgtatgcagaatcctcaaaactcagtaagaaaataacccaggttgggcgtggtggctcatgcctgtaatcccagcactttgggaggccgaggaggacagatcacttgaggtcaggagttcgagaccagcttggccaacatggcgaaaccccatctctactaaaaatacaaaaaattagcagggcgtggtggtgcacacctctagtcctagctacttgggaggctgaggcacgaaaatcgcgtgaacccaggaggcggagcttacagtgagccgagatcatgccactgcactccagcccaggcaacactgagagactccgcgtctcaaaaaaaaaaaaagtgggcaattgaatagacccttcgccaaaggtggcagacggatgcaaatgagcacacggagagagccccaacatcattagtcattagggagacataaattaaatccttaaagcgacaccactacacactcactaaaatagctaaaactaaaaagatcaggtgctctccaggatgtggagcaaccagagctcctgggcaccactggtgggagcctctctgacaacagccctgcagttttgtagaaagttaaacatactcctcatgtaggacctgccattccacctgaggtgttttaagcaagcgaaaggcaagtgtgtggccttacaaaggcttgtacctgggtcattccaagcagttttatttctgatagccataaattggaagcaactccaaagtacaccaaaggatgaaagcataaacaatttctggtgtatctataatggaaaagcactcaaataaaatgggatgaactactgatacagcacagatgactctcaaataatcacaccgagttgaagccagaaaagagagagtacacaccatgtgatatggcttggctccgtgtccccaccaaacctcatttccaactgtaatccccacgtgtggagggagggaagtgactggatcatggggacagcttcccccaggcggttctcatgatagcgagtgagttctcacgacatctggtggcttcataaatggcagtttcctctgccctcctgtctctcctgccgccatgtgaagaaggtacttgcttccccttcgccttctgccatgattgtccccagtcatgtggaactgtgagtcaattcaacctctttcctttataagtcacccagccttgggtatttttttatagcaatgtaagaacagactactacgctgtctgactgcatttatataaaattctaaaacacacagactcccctgcagtgacagaaagcagatgggacaaggggcgtgggagggacaggaaggagggctagagagaggcagaggccgtgctgggggtagggttcaccatgctgaccctggggtgatggctccacgtgcatgcacatttgtcgaaactcaccagtcactttacatgtgctcagtttattgctgtggatcacaccccagtaaagctcttaaaacacacgcagagagcccttagagagcaagaaaaaggtacaaccctcccggcaaaaaataacggaaagcatagttttaatcctcttcctcccaacgtccttcccgagtgaaaataactgccaagttcacagctagcacacgaccttcccccaccagccctgcctcttaagaacactaggagctgcccgagagtcgtattaacaactctgttcaccaccacacacaaaaaccaggccacgttcaatgagttttactctacctgaccccgtgagcaacacagggacgtgagtgtgctgtcgatggcaccccaagcgatcacaccctccaccacactgcctttttaacagagtatctcactgagtagctcggagcatgaaacagctgcaggggttctcagctcccagcctccgaatgaaagtgcgtgctcaagtctctgaaaaataacaccaagctagctcctttgatggaaaagggatcccccaaaatgacgcagaaggaaccgtggtcaggcctgaggagcaggccacaaagtaccagctctgtgggagctggctccagcccccatctccacaaagccgcaggtggacagactgcgcgcaccctccacaccctctggaaagccaggctccgcagaaacacgaatccagcaggccacactcggcacaggaaagagcagcctctcctgaaggatcagcagctctgctccgcaggcagaaatggggcctccaccaacccacccacggcttgctgccgccccgtgagtggagagctgggcccaacactctcccccgggctctgattctaggatttatccttattccttaggtggtctgcacagcagtcagccaactcagcatcccctcatcatttggccaaatttcacaaatacgcagttgctcaccttagagcaaagttaaaacaccaacccgtggagacttctactcatgatttgtttcactcgttaattcctctgcgactcaacaggaatgcttaccctcgtgcctgtgtacaaaagagctacgtgcaaatcaacacaaaagaaatggcaacaatacaccaaactccgagtgagaagttcaccctgaagtttaaagactgtctttcacctcaaaatgcagaggcactgcaaaagtgcatctgtagtgatggccagatgtggctctcagggcccagtgcagaaacctggagtggaatgaagtttgggaagaagccagcctcgcagccctgagagccgagcagcgtcgtcaaaagagcaaggtgcaaaccctaaacgggcactgtgactgatgggacttgcccctggaaaaccttcacccagccttcagcatcggcctacacagtccctcctcccccttggcattatcacagttgcaattcggtgactgttttgtgatttagtcattccctaacgtctgtctcccccctcaacgcaagctccctgggctcagggattaaatctcttaagttcacacaaatgaacagattggagaaaagtttagtgaatgcacaggtgtgctgtgcctaccccaggcccatcctctcccaccgtatatgctaattccttacctgtctccgtttctcctgccaaccacaaaaccatactactggaactgtgtcaaatttatccattttcagaacaggataaaataaccttggcaaataattaattttctgcattggattcctaaaaaaatcattaactttacctcacaaacatctaaatcacatattcattcaagaggtgtttatgcaacactgactgtcaccaagccctcaacacacaacggagggcacagcaggcatggcccacatcgctccatgcgcacggggcaaagaaacagtgactgagaaacagcctcccgcctgccccttgacccctctcagttccctgctgggtgggctgctctcccctcacctcggcggcctaggtcgtgcaaccagtcagccaggccaggagttgtatcattctgaattgcattttccaggttgtaaaagcagcttctaagccatctgattgctcacagccacctctccatggtgcagggtcccacacgtgctctgctcctgcagctgagcctccctaaagcactgagcagaggcctggacacccaggagccgcacctgctctgggatgctggaggtgctaaggggggccggtcagagtgaccaacagggacagacccacccaacacacgggttctggcctttttgcctaccagggcttctggaaactcaaacataccccccaaaaaaatgctacctccttgaattgaattctctttaagttaactttaaatggctgaggtattttggtaaaaatacttcaggatattacagttgacctttgaaaaacatgggtcaaacttccagggtccacttacatgcagatttttttcaaccaagcaaggactgaagatacggcattgacaggacatgaaacccacgtacacagagggctgacgttttgctcgcttgggttccacagggaacttgtatgtgcgtacggggccctggaaccatcccgagaacactgcggggcgactgtatctggcgccatcactttaggaaattcttagcacatggacacacctccgtgaacaggtacagtgcacatgcgtgtctgtcaagccacagcctgggagcagagccctgctgcaaacttcaacccaaagctgcttctaaaaagctcgtgagcagccttcagtgaggctggcatccacctgacctccaacacagatctccttcccgacagtgagctcacattcaggagtgccataaagcacctgcctaagcctccaatgatactcaacaaaggcacaggcttgcatcccataaataccaacccctgtgtcagctacaggttaaaactgctttgctcaaaacttaggaattcatgggccaggcgcagtggctcacacctgtaatcccagcactttgggaggccaaggcaggcggatcacgaggtcaggagatcgagaccatcctggctaacatagtgaaaacccgtctccactaaaaatacaaaaaattagccgggcacggtggtgggcgcctgtagtcccagctactcaggaggctgaggcaggagaatggtgtgaacccaggaggcagaggttgcagtgacccaagatcgcgccactgcactctagcctgggcgacagagcgagactctgtctcaaaaaaaaaaaaaaaaacttaggaattaatggatctagggaaggtgtacatagctgtttgttgtactcattcttttaagtttgaaattttgcaagataaaactcggaggcaaggactgttttgctatctagacatgcaactctgtgtgataatctccacttgggggcggtgggcaagtggagtaacaaggtaaacagtgggactcctggtaaactctgacacagaagcccttcgaagggagccctgctagctctgcagcaccagggcccagtgcccacgtgcgcgcgcgcgcacacacacacacacacacactcatacatgcacactccatccaatcacctgtacttggggctgccgtggtggggcggggtaaggaaggcctgactcctggcctccaggagctgacagtctggtaaagaatgggaatgcaggctgggagtggtggctcacgcctgtaatcccagcactctgggaggccgaggcaggcggatcacgaggtcaggagatcgagaccagcctggccaacatgacgaaaccccgcctctactaaacatacaaaaattagctgggcgtgggagcacacacctgtaatcccagctacttgggaggctgaggcaagagaatcgcttgaacccgggagtcggagcttgcggtgagccgagatcgcgccactgcactccagcctggtgacacggcaagactccgtctcaaaaaaaacaaaaaaaagaatggcaggcacaggtaacccacagtggtcaggggaagcctcagggctgggccagaaggaagaacagtgcgccgcaggggcatggtcacggtgaagctgcccatgtgggtgtcaggagctggccaggtggaggaaagacgcacaatgccagcgctgcgaggccaggcgagcagcgcagcgggccagagccccgataggggtgtgcggccacgtgcacaaggagaggaggcagcagaggcctctgcagcactccagggagcggaatcacaggcagggacgccaacgagcccgccaggaaactggacacctgcatctccacagtgcccggtcagtgcaggcaacgaatctgagtttctggtgtcctggataggacgacacagcagcatcacaagcatcacagacgtcaccacccagagtcaggacaccacagccttttcatgccaaagcccaatactaatttagattcgctttcatgcgtagacagacacataatttaaaacagctctgaaacattaaaatgattttccagtcattcaacagttaataaagtttaccctgcccagcagtgcccatttcggctttttcttaactgtcacaccccactgcggcctgtcgtgcctcgaagcacattttcaattagccctgaagccagaggacgcactcgcaggatgggctggacagtgctgggaagggtcttgcttgccctactccacacacctcagtacagcctccaattttccaattaacatgcttagagtaataattttttgaaaacaaatttcgtccaaaaactttactaagttgccaataatgttgaattgtcttatctactttttaaactggccccacaaaatgtatcaggtgaccacgaaagcaacaccaagggccacacagcacagatgtggaacctcatggataaacacgtggcagggcctgattcaggaggctctccgtaccccaccacctccacaatacgatggcctccttcacctcttctcagtactcaattcacttgcccaactgcacctgagcttcctgaaatgcctgagtctatttgacagacacaacatgcaacaaacaggaaatgacttgcacttggtctcaggcaggtttttctccacggctttaggtgaaaggcttctgttgaaaacactgagcacctggtatcacttctgccttcgtgaagccttcccttatattctcagccattcctggtttctaattttctcaggtttctaaaatctctgaaacccacaagcctcatgtgacttcactgactccctctttcagggagcctgggtccaaggtcggaacgtggccaggctgctccaggctgggcgtccaagccctcgtcctccaggcaccgcacaccttgaggcccagcatgtgcagaatcaggctgtgctcgcttccgccgacagcagtgagcatgctggctgggcccagggtgccttctcgacactttgctaaacctcaggataaagcatattcatctgcacatatttaactcccaagactctaaaaatcctgcactaacagagagccttcacttctgcacaattttaacatgtgctctttcatctgcagattctgaattcattcaaatgacactttgggcattccctttgccttgactgagagctcagttccaactctgtgcccacctcccagcctccccctaccctactccactagcagctgaacagagcccaaggtgggcgtttttcactctattctccctctcccctcactttctcattaatcatatcttcttgggttatgagtacttttcttagtcaccgtaagttcttactagagtaagcacatgtgtcaacaaataaaataatcaacaagcaaaggctcccaccaaaaccccagggagacgccggggtgcagggcatgcagcccctggcacccggagacggggctcgcagggaaggccccgtggaacagcccgggaagagggcagctggcccagcaacaccgagacacggaacgcacaggacacttccaaacaaaagttccagattcttctcaccatcagcaagcaagaaggaaacaaccctcctttcctcagagctcccccgcagcactgtccttctgcgagcctgcacctcccatctcgcactcttcctgaagccagcagtatctcagcacctctggagtctccatgttaagacttcacatatttggatacgtttgatctgctaacttaaaaacagttagtgaagtcaccatttggatggtgcttccaggccagcggtgggggcagtcaactctgcaagcagtcggctctgcttttctgagaggacaaggaccatgctcagattccctccacccccgaactcctgctccctgagctaccatctcagcagtttctgtgtcccctgatgggccaggacacaggacttctctaacctaaagtctacacgtttgtccagatggcaacaagcatcgcttctcttccacatgttcactgtgttttaaggcagctttatccacagaggctggggaagggagaccaatctgagagtgccagtggcaagaagaggagctcggggccacaggcagcgcctgctgtctgcagaggatgggcttccagaaggcccggtggcccaccagggcctcggctctcagcacctgaaaccacatccccagcactcaactcccaatgttctgcttactttcaaaatgttttaaatagtgccaatcccatgcacaatttcaagaaaactgaggtcagctggcagatgacatggaccttaaatgacttacagcaaaacgtcagttctccagaacccaactttcagacaacctcacttatcagaacacattggcagggagacagcaaagcaggggctctgagcagccggtggccaaccagcacacactgggcactggccccaaatcagaaacacatgtggatggtacacaccctcctagagcttccgatcaatccgattcatcagtctatgctaggaagggaagctgcccagccctctaagaacctgccaccagcagatcttcttggcctcatctgagcaccgagactggcttctcgaaggaagcagctgggaaatgatggatgcggggggaaaaaaagaggggaggcagctgtctggacgtggtgagaggcaggagggcaaagaaagcagcaaggatacggtgagggagtgacctaggaagagcagggcagagggccacccacaggagaagagtgaggccacagatgagatccctcagctctcagcagggcggggtcaggcagggtggcctcagcccccagcggatggctctggtgctctccatgaagcaacaaggggagccacctgccaagatgcgtgtgtggcaggaatcagagaccaaggcagaagagggaggtggcaggacaaaggagctaacaagggccctggtgggttttaaataataggaaggcatttgatacgatccaacatccattgagacaaactaacaaatatcccctgccccaagaaaagcaaacagaaagcaacttcagaaaataagaagtgggagctgggcagggtagctcacgccagtaatcccagcactttgggagaccaagtcaggcaggtcacttgaggtaaggggttcaagatcagcctggctaacatggcgaaaccccgtctctactaaaaatacaaaaattagccaggcatagtggcgcatgcctataatcccagctactcgggaggctgaagcacaagaattgcttgaacccgggaggcagaggttgcagtgagatgagattgtgctattgcactccagcctgggcaacaagagtgagactccgtctcaaaaaaaaaaaaaaaagaaaaagggccaggtgaggtggctcacgcctgtcatctcagcactttggaaggctaaggcgggtggatcacgaggtcaggagatcgagaccatcctggctaacacggtgaaaccccttctctactaaaaatacaaaaaattagctgggcatggtggcaggcgcctgtagtccctactacttgggaggctgaggcaggagaatggcgtgaacccgtgaggcagagcttgcagtgagccaagaccgcgccactgcactccagcctgggcgacagagcaagactctgtctccaaaaaaaaaaaaaagaaaatgagtgggaaagaacttccttaacttcccctcaacactacacctgagaccccaacaagcccaataccagaagacaacaagggaatgaagcacaggacgtcagtgaaatacaattgtcattaattgcatgtaataaattctctaggtgcgaccctcaaaaaattgcaaatttttaatggaagagttgaagagtgctagagtaagatcaatatccaaaattcaactgcgattcaacacactatcaaagaagaattagaaaacgcaattttttgtttatttttagacaagggtctcattctgtcacccaggctagtgtgcagtggcacaatcatagctcactgtagcctcaaactcctgggctcaagcgatcctcccaccccaacctcctgagtagctgggactacaggcatgcaccaccacacctggctaaatttttttttaattttttgtagagacaggggttctcactatgttgctcaggctggtctcaagctcctgacctccagcaatcctcccatctcagcctcccaaagtgctgagatgacaggcatgagccatcattcccagccagaaaatgtgtttaaaaaaaatacttaaaatagcagcaatgaactcagaatgtcctggaatgccctacacatatctaacaaaatatgtgtaagacctatatgaaaaagacacataaaacttgattgaaaaatattacaaaatatgtaaatagagtaatataccatattcatggatatagtcactatctcatagatttctttttttttttgagatggagtctcgctctgtcacccaggctggagtacagtggcgcaatctcggctcactgcaagctccgcctcccgggttcacgccattctcctgcctcagcctcccgagtagctgggactacaggcacccaccaccatgcccagctaattttttgtatttttagtagagacggggtttcaccatgttagccaggatggtctcgatcccctgacctcatgatccgcctgcctgggcctcccaaagtgctaggattacaggcgtgagccaccgcacccggcccatagatttcagttctcccaaaattgacccacagattgatacaacttcaattaaaataacctacaaggacttttatgggccccgaagagttgattctaaaatttataaggaagatcaaagtgccaagagttgcacagacaattctcaaaagcaacagaatggagtattacctctagtagatatcaagaattagtatggagctaaattatttaaggacaggatgctactgatgaaaggacagacagataaaccaagagaaaacaaccgacaggctagaaacggatgccacataatataaaacctgaaatgttacagacgggccatggagaccacagaggtgaggaaggaccattcaaataaataacaccaggacaactgtcaatccaaataggaggcaaatgaaaatggagctctaactcacaccacacacaaaccccatgccaggaggattacatacttaaaagcaaaagcaaaagctatcattttagaagaaaatacagaagactattcctattaccttcgggttagaaaggacttcttaaagatgacttgaaaaagcttaccaaaaaggagacaatagatacattcaactacagtaaaatcaaggagtcctattcgtcagaagacaccataaagaaagtgaaaagatcagatataaactggaagaagatactggccatatacagatgacctacaaaggaacagtaaccagaatatgcacagaactcctataattaatacgaaataatttaaagaaaacggggcaaaaagacacaaacagacatttcacagaaggttacccacaaacaataaacatagaaaattaatttcctctatattaaaggaaaagaagttaaatgaaattaattttcattaaggaattaaaggaaattaatcaaatttctttttttttttaaaaaaaaaaaagagttttgctcttgttgccctgcctcgagtgcagtggcgcaatctcagctcactgcaacctcccgctcacgggttcaagcgattctcctgcctcagcctcctgagtagctgggattacaggtacccgccatcacaaccggctaattttttgtatttttagtagagatggagtttcaccatgttggccaggctggtctcgaactcctgacctcaggtgatccacccgcctcggcctcccgaagtgctgggatgacaggcgtgagccaccgcgcctggctcattaattaatttttaagtgaaaattaagacaacactatcagagcattttacacccccagattcgaggaattgaaaagtctgacaacacccagtgctatcaaggatataaaataacagaaactgctgggaggcaagtgaactgttgcaactaacattactcatgcagtactgcaagacaaactgcaaggaaatgacaggccagtatccctcctgaacctacacaccaaactgtagcaaactgcatgcaactgtatataaaaaggataatacatgtgaccaacaggggttatgctaggaactcgccagggtttaacactcaaaattaaatcagtgtaattcaccatgttaacagactaaaaaagaaaaaccatacaagcatcccaatacaggaagaaaagcattttaacaaaaataaacatccactcacgacaaaaattctcaccaaactaggaaaagaaggtgcatagactgaatgccatcacaattcatatgctgaaacccaatccccaaggtgatggtagcagaagcggggggactttgggggcccagccctcattaaccggattagcgcccttatgaaagagcctgtcccacagctgccttgccccttccttccacactctgaggacacacaagaagctgcatgggagcaggcagcaggccctcaccagcatggcaatcttgcacttcccaggactgtgagaaatgaatttccggtgtctagaagcctcccagtctatggtattttgttacagcagccagaatggcctatgacagaaggggattcctcaacctaacacagggcctctatgaaaaacctgcagctgacatcatgtgcgtcatgagagaagacagactgcctcccccaagatcagaaacaaggcaaaatgtcccttctcaacgcttctgtttgtcatattacactggaggttgtggccagtgcaatgagacaagaacaagaaataaaaggtgcacagaccagaaaaaaagacatgaaccactctttactgcagatcacgcctatctttgaagaaaatcctaagaaatccacaggatataaagtcaattttttttattttaattgcatttattgtatgctgagtttattcccatgccacaagtttttgtttcttcagtttcttctggtacagttttcctctgtgcaacttcctcacctggcttgggaacaagtgtctttaccgtgaggatcgtctcaatgtgacggggcgccctgtatggatgaacccgaccaccagccctggaagtcccacagcgcatcctgggtgctcaaacaccagagagcctacatctacaccctcacattcagtgtgactctccacatttttaattgtgtgcagcaaaaattcagcgctcttttcgggtcaccaaccctgtgtccagccccactgtttggcctaggtacacctgccagctccacccctgccaagtcggaatggcatacactgtttctataaagggacgtctttcagacacttggtgacttctcacgtatgcatacccttgatggcctgggcagtttcacgagcgttcttaaagtgatcaagaagacctgaacctctggatttgcacgattttgtggggatttctgggtcaagtgactaatgaaccattttcacagatcatctcaggccgcttggggaagagctataaagtcactatttttaaaagcaatttttttgttgttttttttttggttttttgagacggagtctcactctgtcgcccaggctggagtgcagtggcgcgatctcggctcacagcaagctccgcctcccaggttcatgccattctcctgcctcagcctccaggtggctgggactacaggagcccaccactacgcccggctaattttttgtatttttactagagacagggtttcacagtgttagccaggatggtgtcgatctcctgacctcgtgatccaccagcttcggcctcccaaagtgctgggactacaggcgtgtgccaccatgcccagctaattttttgtatttttagtagagacagggtttcacagtgttagccaggatggtctcaatctcctgacctcatgatccgcccgcctcagcctcccaaagtgctaggattacaggtatgagccactgagccaccgagccactgacccaccgcgcccggccaaaagcaattgtttttctaaatactggcaacaattggaaacaaaattttttaaaggaccacgtacatggcataaaatatgaatacttaagaataaatttaacaaagtatgttcaggatacaaacactgagaacttgaaacaaccctgagaaaaatcctgaaaggcctaaatcaatgaagaggtacaacacgttcgtgaatcagaacactcgatattgctaagatatcaatgatcataaaaccgatctatagactcaatacaatcccaagcaagatatcaaggtattggccaggcccagtggctcacacctgtaatcccagcactttgagaggctgaggcaggcggatcacctgaggtcaggaattcaagaccagcctggccaacacggcaaaaccctatctctactaaaaatacaaaaattagccgggtgtggtggcacgtgcctgtaatcccagctactcgggaggctgaggcaggagactcacttgaacccgggagtcggagcttgcagtgagccaagatcgtgccactgcactccaggaaaagatgtgaaagagtgaaaaattccgtctcaaaacaaacaaaaagctatcaaggtatcaagaggctttttttgtagaagttgacgaactgattctgaaacacatgaatgcaaacgaccagaacagccctcaacgttttcgaaaaagcagcactggaggactcctgccacccatcaacactccctctaaatgggctggaaagtgctgagctgcagaagggaagacaaggacatgagtggacagaacacatcccagaagtgacgtcctcacacgtggccgactgagtttcaataaaggcagcagcatcgttcaatagagaaaggaaggtctcctcaacacataaggctggcatgattggtaaccacagaaaaaatgagtctcaaccccctaccttacaactctcccaaaattaacttgaattgggttgagtaagagctaaagccataagcattctagaaaactcctgtaccttgggttaggcaaaaatttatttaagaaggcacaagatgaattcttaaaatgactcactggatttatttaagaaggcacaggacgaattcttaaaatgatacactggatttatttaagaaggcacaaaatgaattcttaaaatgatacattgggcttccttaaaattgaaaacttgcactttaaaacgcatgcagctaaaagaaaaggcaaacacagaccaagaaaatagttacagaacaattctatctgataaattacttacatctagaaaatacattttaaactcttactaaatcaataatgacaaaactaacaacccaatttaaaacacacagacaaaagatttgaaaagacacctcccgaaagaagataggcaaatgagcaaataagctggtggaaagacgctcagcattagtcactagggaaatgcaaatcaaagccacaacataatggcacggcacccatcgaaaaggctaaaattcaagactgaccataccagctttccgcaaggatgtcaacctttatgcgctgctggtgagacacaatgcaaaacaggacagccactttggagttccttcagaaattaatattcatttgccatattcagcaatcccacccctagttatctacccaagacaaagaaaaacttatgttcatataaagatttataggaaacattcatagaagcattgctcataataatcaaaagctagaaacaacccaaatacccatcaactggtaaccagatcacctgcggtccagccgcacaccaggatgctgctcagcaacgcaaaggaaccagctactggcacgcacacgacacaccacttgggcaccacgcagaagtatcccgccaagggaaagggccagatgtgaggctcccactacataatctcatttatacaaaattctagaagaggcaaaatcacagtgacagcagcagctcagtggctgccggggaggaagctggagcaggggctcacccccaggggcacgaggctacagaatgattccgatcctgtactcgacggtggtggtgacgtgactatcgttaaaactcacagacctacaggctgagaaaggtgcgctctgccacgcgccaactacgcctccataaacggagatttaaaaagtagtatgtgctaacactgcatgcccactagaataggcaaaacagaaaagcctggccacgccaagagccagcaagatctcacggcagcagcactgagcccgcggatgaaactaaattcgcagagccgctcaggaacacagcctggcagtttctgacaagaccaaactcacaccttccgtacgactcagcgattccactcctaacatttacccaaaagaaaaggacgtctacacgtatgttcgcacaaaggcttgaacacaaatgttcaaaaagaagctttattcgtaatagccaaaaactggaaacatgccagactcctcagctggcaaatgtatagcgtacatccaaacagaaaccattccccataaaaataacaaactgtggacacgtgttgcacacgatgcccctccaagtactctgagtaggaagccggacaccagggagcacacaactggggtttcagcgacctgagcgctccaaaggacagatccacaccgacggcgagaggcggcccagagaacaccttcccgtccagggctgtgggccgacagcagagggcacaagcagaccctctggggggctgaacgaaatgggggtagacatcctcaatctgtgcacttacaagggggacattttattgtatataaattatgtcccctccaagaatttttatgcatgttaacctctatttaaaggagagcccctaccctcaaactgtcagcctccacgtacagccacgcctcacatcatgatgctcctggcaataacagacggcatacatgacgctggtcccatcaagaccatcctggctaacagggtgaaaccccatctctactaaaaatacaaaaaatcagccaggcgtggtagcatacgcctgcagtcccagctacttgggaggctgagacaggagaattgcttgaacccgggaggcagaggttgcagtgagccgaaattgcgccactgcactccagcctgggcaacagagcgagaatccatctcaaaaaaaaaagaaaaaagaaaagtatggcacactgaccaggtgcagtagctcaccactttgagcgggtgagatgggaagactgcctcaggccaggagtttaagaccagcctgggcaacaaagcaagagcccttctctctaaaaaaaaaaaaaattgaaacatcagccaggcacagtggctgtagttgcagctacttaggggaggccaaggcaggaggatcacatgagcccaggagttcaaggcaccactgcactccagcctgagtgacagagtgaggccctatctcctaaaaaaaaaaaaccctcccacatacaattctgtagcatacagaatactggctaatgatacagacaggaggcaaggaaatactgggtagaagagggcaatttcccagcaaaggccccaccctcaagcctggacacctgcagccctaaatgggaacaggcattcctgtttccgcgcccaaatgttgccttttccaagactaatctggcctgccacgcccctatctggtgcccatataaaccccaagctccactgacgagagcaaagtggcgcagcagagaaggagaaaagagaaggagcgtctgaatgtcgagaggggtttggctgggcaccgtccaggaggagatcggctgcgggacggctgaactccagaggaagatcatcttctcactccatccccttgccagctcatccatctcactgaaggccacctccatcactcaataaaatccccacaaatgccatccttcaagtccgtgtgacctgattcttcctggacaccgcacaaggactcgggtaccgagagggcagggggaaaaaggctgtcgcctgactctctgctgagctggttaacacttagccatctgagaatggcaactgctaaaagagcattcattgtaatctacccctaggtgctactgtggggcgggagcccaaaagggctcacccgggctcctgcacctgcccgtctgcacgctcccctgcacgctccccttccagcaaatgagccacagcccctgttgcaagtacccagagcgggtcagggaactctcctgtttcaatgataattagcaacaatgttactggtttacatattcactacattctacttcccatcactgtttcagaaatatactgcatctacttattaaaacttacagttaactgtaaagcagcctcaggcaggtccttcaggaagagtccagaagaaggtactgatatcatagggatgacggctccatgtgtgttactgcccctgaagactgcagggagacgggacttggaggtggagggcagtgatgtggatgatcctgactctgtaggcctaggctaacgtgtgcttgtgtcttgtttctaacaagtaagtttaaaaagtaataaataattttaaaaatggaaaaaagctcgctgggcgtggtggcacacgtctgtaaacccagcatttctggaggctaagacaggcagatcgctagagcccaggagtccaagaccagtctgggcaacacggtgaaacctacaaaaaaatacaaaaattagcccggcatggtggccacgcctgcctgtagttccagctatccgggagcctgaggtgggaggatctcctgagcccaggaggtcaaggctgcagtaagccatgattgcgtcactgcactccagcctgggtgacagagcttacagaataaggatacaaagaaagtatttttttgcacagctgtataatgtgtttgtgttttaagctaagtgttactacaaaagagtcaaaaagtttgaaaaagttaagtttataaagttatagtaagtcaaggttattactgaagaaagaaaactgtgtttttataaattccatagtccctaagcataccctaagcatagagtgccccagagcctacagcagcacagtcatgtcccaggcctctcagactcccgcagagcaacacccagtcctgcaagcgccattcatggtgagtgccctacacagatgcaccatttttcatcttttatcccctagttttactgtaccttttctatgtttagatacacaaactcactatcgtgttacaactgtacacgtcacaagccatgcaggtttacagcccaggagccaggggccgcaccacacagcctaagagtgtagcaggctgtgccatccaggtttgtgttagtatattccacgatgctcgcacaacgatgacattgcctaatgatgcgtttctagaatgtatccccatcactaagtggcgcgcgactgtacctggtttacacataattccaggaagtatttctaagcccactgcaggctggacgggaagacacagaggcagggcccgttagctaacccaggcttcagcctcccaccaatgcaaagaccaccctgcctggccttcccttaagactgagcctcccctgtctccagcccaatattcccaggcagagctaacttgtgcttattatatgctttttgccttggcagagaaaaatatatgtattttttaaactatttccttccaaaattattttttttaagttttagtgcttgaattatgcagaaaagcatcactattcagagtaatttcctgagtgtactacacataaaacttcaagtttttcaattaaaataaaatgctaccagagatgatctccagattatattaagaaaaaatgtcaaggtaaaaattagcgtatatgctacattagttataataggagaaaaagaatatatgtgtgtatgcatgcgagtatgtgtattttgaaccacataaatgttttataccctcaaaatacaaaatgaaacaaaaaaagtaaaattgaaaacaaaccaaaacataactaaattgtgtatcaaattggtaacataaccaacacaaaaaaggatcatttcagtggagttttgaacacagtactgatctaacatccttaaagaataaattctaaagacaaagagtgcaaagaaaccttaaactttactctcatgttattgttgtaattctgaatctgtgtttaagtatagggtagcagaagccaagtaagtaaatatgtttatgttactaggatctaagcttttctgtgcaagagaagagataaaaatacaatttcacagaatttacaggagggggagaatgtgctgtgttaaaaatgtgaccagcatgaccagcacccccagcgctgccgaaactgctcgagagtcattttcctctaaatgccattccaaggctcctccgggaagagacaggcctgggacaggaaatacaggatgaggctgatgtcttgcaccagaggcaccaaacaggatggagcgaaggccaggaggagacccatgggcacagggagcagtccgacatggcaatggacaagccactcagcccagggggagaaaagaggccaccttgagtgacacatgaaaattaatcctggacagattagtgactacaaggaaaagaaaactcacaacgccgacatgaaaacacaggtgagtaggtaaataacctcaggtagggagagacagtctagccacactgcaggaagagaactcgcaaagccatgccgctcaaacggaatcccatcgggatgctccccgctcaggactgtcacagggacaaccgtcccgcacctcctggcccatgcaccctccccaccggccacacaaggtctggaatgttcttccctgcccttcctgggaaagccctgcctgccgtgcctgcccgctcctctctacccttgactcgcttcaggtgcttggtggagacgatggcggtgaaactttcaacagcgcgcctgtttgggtttaagcttcagagaacaggcgcagaatccctgcacgtgcaagcactccgtgagtgctgtgggatgaaccagcgatgctgcctgagccacacacccgtggtctcggttctacagttctcccttggtgacaggaatacagactagcatgcgtttcttttccatacttttttgcctttatcaaattttctaggatgagtacgtactactcagaaagaaaataactatttaaaagccagaaaactgccttgtttgtgagtgtaaggctacataagctattgccacacacctgctcctggaaagggtgaacgctgaggagagcgcaacagatctgtggcgaaagagcaggcgggcatgaaaactctttctcgtctaatccagagcagacgctcctgcttggacgaagggaagacagaactgacgctcggggtacagacaggtcccaaacacacagctcctcatttgtgtcctctgcaggaatagcagtaacctctttttcacaactataacgaacaaattttccttctctcacgcaaacacttccaaatactgattctctcctaaagaaatgcaaagttccacagccagcatcagatttaagaggcagttaactaggctgtttcccgccaggccgctgaaagccctcgctctgcggtgcccccgtgcagcagacggcagacattgggattgggattctgtgccaacaaatgagacacaaatgacaaccacagccataactgcctttccttccccgaaacaccacgctacaggcaacaggaaggaacatggccccagggacttggtacggctttactgaaatacagtttacataaaacaaaatccacctattttaagtgtgcaatttgaaaagtttgggcaaatgtatacagttgtgtaaccactaccacaatcaagatttaaaacgtttctattcgcttaaaacatgtcctaatgccacactacgtcaccctcaatccaggcaaccacaactgttccagcttagctttttctagaatttcatacaaatgaaattgtgcgataggcggtctttccctcccggcttcttgcacctgctggggaattttgtagattcactgtattgctgcatgtgtcgtgatccgctcctgcgtggagctgagcagcatctcaccatacggatctatcacatcacctgtcaccactcatggcaggatggacacttcggttctttccaaatatcctgggtggggctgccgcacacggtcaatcagtacttaactttttacgcttctcctaactgtcagcgttgagggtcccaggacctccacacccaccgacacacgggatggctgtcagtttaactccagctgtttttaggtgggtgtgttatcagccgcagcatcccactggggtttcatgtcctggagtctaactatgtgagcaccttttcgtacacctgctagccatttgtgtaccttcttttgggtctattcaaaccttctgcccatttttaaccgttgtttgtcgtcttgttatttagtcgtgagagttctttacgtactctggacaccagttctttgttagatataaatattttctccaagtcgacggcttgccttttcattgtcttaacaacgtctgtcaaccagcaaaagttttcctttaattttgaagtcctatgtatcgactttctgccctattagttcatgctacttgtatcctaggaaatctttctccagccacagtcataaagaccatcactgtattttactcatctattcttcgacaattactctcttttcagaaggacaacttcagtgtcactatgagcgggacacactcttactagcatggggctatggtagctaccactgcaatcccaaagctgaccaggctccctccttaccccgagaggtcacaccaccagcctgcactgacacccctgaaacactgaccttctagaaacattctttttttctgagagagtcacaccaaggtctggttaacgaggcactcagagcatggacttctcttaaagctgatgaatattcgtgagctcctttagaaggaagagatcacacagtctcagggcacctgctctaccctcttccctctacagcgagaccctccccacccccgcacaagaaaggggcgctgagaagagtaagtccacaggcaagtgaagaccccatcacatgcacaacaggccacactcaggacagcgctagaggcaccatcacactggaaatagcataaaaagagatggaaacggtggcggaagatgctgcagcctctgcctctgccgtgagcgcagagcgcaccgtcaagcccaggtgatgcaacatgcttcagcaccaaccagacttcgccatgagaagagtcgcccctggctcccatcacaggaacacggcagaatacaaacgcacgctatccaatgtcaatcataccaaaaaggacacagccatggaagccgcaggtctatttttataaacaccagcacccgggattcctcgccgagatgttcaaacacgggcgctgcctgacaccggcaaccctgccccgggaccgccccacatcagggccatcccagacctagctccccagcacccaaaccctcactggaccaccccctcatcaagatgcctggtcccccacccagagtcacaatacggggaagggtgtgtagaagaaatcaagtctcaaagtcacctctgaaaatccctgaagccctggggctcaatgccgagtcaattccctgtggctgcgacatacctagcaccttcccacacagggcaggctggcgcgtgcctgcccaagtcccagatgagaaagggggctgcctctgggagttctgttgtaccacaaatgcttttctaaaaaccaagaggcagcccagccctgtactagctcctcctggacacacctaggaaaggatgggagttgtcaagtgatttgctcagctgggcatcccgagtgcagagcagtgaggacaaccacagacagggccacctgcaaggcctggctggaatctccctgactccagctggccagcaggtcctagctagcccctccctcctgtccccagggtggaccctgctcttcccctaacagaggtgctcccactctcatgcaacacaaacccactgcacttccagggtcctcgtgtggggccacacctctgttaagcaggatcgtctccccacgtgcccacctccgtcaccaggctccatccccacaggccctctccctgtatgcccaccttgtgaccaggcaccatccccccagggccctctcctggcgtgcccacctcggtccctgggctccatgccccctggtcctctccccacatgcccaccttggtcaccaggctccatcctcctgcagccctctccccgcatgcccacctcagtcaccaagctccgtacaccccaagctccgtacacccccaccccagccctctccccacatgcccacctcggtcaccgggctccattccccccagccctctccctgcatgcccacgttggtcaccaagctccatcgtcccgcggccctctccctgcatgcccacctcggtcaccgggctccatccccccctgggccctctccccacatgcccacctcggtcactgggctccatcccccctcccccagtcctctccccgcatgaccacctcggtcaccaggctccgtcccccaactccaagctgcagcatctgcactgtgcctccactggcaccacccaccagccccatcatggctgctggttctccaggtgcagcagtgcccacgcccgccttccacatctgcccccactatccccaccatcaggatgtgccgagaccctgcaagcggggttcccaggctgagcttctgtgcgagtgtctgtgacctgtccaggaagtggatcccaaacatgtgccctgcagggcagtggtgagcatgggaggcgcacacagtgcctggcaccagccagcatccagcagccacaacacacaggcccacttctgcgtcccctgctcagtgaccaccgccctctttctgattctgtctccagtgtgtcatcaggaccaacatctagaacccaggccagaccttctggctcttccactccacagccttcaggggtccccactgcctgcagaggaaggccctgctctccacatcgtcctgggtctcatctacctgagtcacacccatactcacacctgcagagaagcaccacggcccagatccctgcctgccccagccccgcaccctgcccctcatccaccgtgcaccccagcccaactcccaactccccagcagtccacagctgccaccagggtcactccagagggaggcagggcccgggcagaggttccagagcccgggtttctagccccaggccccaccagtcacgtggccttgagcagttcatagaaatgcgagcctcagtgtctcgtccctaggcaggtttcacgacaccatcgtcacaaagactaaacacggtgccagagacgacggcactcaagatgcttggagcaaagtgactgcttcagacctgctgcagaaacccaacctgtcacggagcacacagcagccccacggagcagcctgtccccaaggcagggagtcagcctcacccgctcaccccatcttcacccaacgcctactgtcacacgctggagttgtaagtactcacggaggacacctgacaaactgtttttctacaaccttccatgaagatgaggccacaacagtcaaaacaggtaacacccagagcccccagaggacactgcagaccagaaggttctgcacagcagcgaccagggcacagcagcagaaggaagggctcctcccccacatgacctatcctcggcctctcatcatcctcccctccagggtcccggcctggctctgctccccatggaccactccatgtcccatcactcaccgctcccttctcctgccagtctggacctgggcacagcaagagtctcctcctggcacctctgccccataggaggcaacttctgacgactcttcccaaaacgccacaatgcctgcttgtgcttgtacatggagattccagacaggtgcccccacccgctgagagcagcccggggtgctggcagcacagtctcctctctcccccacccctccccagcaagacccaccaaaacaagagtaaaggaatttaaatggtcaaagccccaataaaaagagaagagaaggacaagagagttcaataaacccagtgcaggctccatgagagccacagggctccggaacagcagaggcccgcccgggagggcacacccctgctgctgataggacgggcatctaggcatcacccagagccacctgccaggctccaggcagaaggaagaagtcacggcagaaaggacctctgccgaggaaacacacacacattggccccaagagatcagaacccccacacctggccccccagaacaaggcatgcccagcgctgcttcctcctgcacccacccagcaaggcccctttctgccactacccacgctgccctgggcactggggaatcagtggagaccccaggcagggcccctcccacagagcagctcagagctgggaagaaaacattttcacccctcacaggggaagcatctgaagtcaacagcacactctcgaaaagttacaaggaggttcagaaagggaggaaatcaccatggaaatcacgtccaaaatgaacctcagcccatggcccccagtgtcaagtggaaggcagggtgcagggcagccccgcaggcgctggggctgaggagcaagaagggaccaagtcccctgtgggaccggcagccttgggagggttccagcgaggccccggcctgcgccccagccagtcacagaggccccttcctgcccactggccagacacccagggtgctcagctcttgacgtgggacaccgggggttctgggcccactgtgcctgaagcaatcacagggcgtcaccgcccggcctggctactctcaggcctcctctcacacgatactcctgtcaggcagggagccacccagcaatgctccctccccacagggccctgggactgccctccccaggctgcacgtgcagagggaacttcgtcatctcggccctgcagcatgagtcccatccaccgttcactcccacccctctcaccgccataggacacagggctgggcctgtcccagacctgttttcccaccaccaagagccctgatccacagaggccaccctccctccccatccgctcggtgacccccacagccatcaagacagtccctcagtccccacagtccctcctctgaggggcctggcccctgccatggcaccacttcagaacctcatggcaggtggcctgtggccctcaacgctgcccctgccaagcctcctgcagccatcactggccaggccatcaatacctcaggggcgtcccgggtagcagggatgcagtgatgacaaacagatccacccgtgaggaacctgcacccacaggacatgctccattctggatatctgccaccccttcctggacaaaccaaggttgccgcctcccaccaggctctagggcctgcagacacacgaccaaacccctgcagggccatgtcacctccacaaccacaaggaagagagatgacaggaaggccaccttccccttctgcgtcctgcaccgtggactccctgcatccccgcagcacagcatggccaccgagcaccgcagacgtgcccaggccaaccagctccaagtggggtgcagtagcggggtgcaggctaaatgacagtggcctggatgaagtggctgacatgaagcatgtcaaaggctcaacctccccctcccgccccacccatcctcatccagcctaactcccaccgacccgaagcacgaatccaaatggggcgcactttgtttccgctattgagcatggctccaagatctctccttaaaatacaaacaggaaaaaacaaagaaactgtcctttgaccccctcaccacagtcagtgacctacttctccatctcctcctgaacctgacccccagcactgccatctggaaccagccgcctccagtcagctgagatcgacaaaccccagggtgccctgccccgcaccagctccacaccccagccccagcccgtgtgtgccctgtgggtcactgcctcccctgcatcactagaatgtccccgcccaggtgtctgggctgggatcttgtcacctcccccacaacagatgggcaagtgtcccatggcttgaacaccaccgtccccacattgcacccctatgtgaactgcaggctcacgctccaggtgcctcgcgccaccccccacaccccaggtccctcacaccgccccccacaccccacaccccgggtccctcaagccacccccacaacaccaggtccctcacaccaccccacccccacagtaccagatccctcgcgccatcccccatatcccaggtccctcaggccatcccccacaccccaggtccctcacgctgccactcgtaccatcaggtccctcacaccaccccacaaaacgccatttccttcacaccataccccatgacatcaggtcccttccgccaccccccacaacaccaggtctccagggctggaaccatgtgacccaaggcaggtggcagcccttcccacacaggaactctggtggcacgcccacaacctccaaggcactgaggagatgccatccccaagcccagccttcgggcccaggcagagctgcgtctggcccacagagcacccgaaagtggaagagggtggccctatcacctgtccagaatcacagcctccaagacgcccagtccgtgctttcccaactctcagagctctgcgtctaatcgatggtggggcgaagggagagccacggcggccctgagtgcaagcaccatcctgaaaccaggagcccatgaggccgcgggagccggaggaccaggaccgccctcgcactgccctgtgacgagctcccggcccagctctctgccgctctggatccgtcactaagcagctccattaagtgcccggtcaggcaggagcggcagggaaacactggggcacccacatctgaacagagaagatgcccaccttgagaaggtactctggagaagggagccacgagcgacgtttatgctgagaagcggcatccgtgcacctcacctccgcccgtccacgccgacctgcagcactccccaagcaactccgccagcaagctgccagatccacaaggtctcacctgagctactgccgagtgaacgtttgttgaccaaccaaccaaactcatccccctggcccaccaaggccaagcacggtctgaggcctgctggctgtccacccgtatcccaccctgcccccaggcacaagccgaaccacccagcactctgtgcagacagacacagacaatgaccaagtcttctcggctgaaactagggagaggcctgcatcacttctgagcaagggccttaagaccaggagtgcctcttggccacttgaagcccttgcagccgcaggactgcagggactgacggagatgagcctccccaggcagatgaggtggcccagacctagcagacagccaccagctggggggagcccaagcactggagggcccacaggacccagtaggatcgtcgggtgaggccacgcgccacacagacccaccccagtgcaacagcccctcaccatgcactcaggatattcccttctgtggattttctctttgaaagcccctgtgctttagtggttttaagttgtaagtttgctccaagctgaaccatttccagtctctctcagcagcacaagcatgaaggaggcggcctgaaggagtgacaggtgccctgtggcatgcagcctccattaaggggccacggggttttggagaagctggtcacctctgtgagcctcagcgtctctgtggaaggggactctcttccaggactttctggctctagagatctacagatctgtgaatttgtgcacgccaacatgcggcaggaaggcgaggactgcacacacaagagcaaagcggcctccatcacagccatgctacctctgccatcgctgcgctggaggccaggagagacgccaaccttgcaacaaatgctactccaccacataaggctctcagcaacggccacgccatgtccttccaccccaagagctgacagctctttgctctgggccacccttcctgcaacctcctccaccaggctcctgcacccaggtgtccaccctcaccaccccactcccagcactgctggccagatgcaccctatgaatgctggcctctcccggcactcctctctggctcccaagctggcccagccttggaggtgccggcacctgcagggcagcctcctacggctcttctagtctactctacaggctcataacaccgtcatggccatcagagccagcaacaccacgactcccagaccctggcctgtgccagctgctcccctgagctcctgcctcccaccagccaccgacattccctctcaccccgcctgcccacctcaatctcattccacaagagcctttgtcttcacccctccctccagcccatccacacctccctaagccccaccatctgccccaggcccctgccacaaccacccccacattccacagctcagacgcaaaagtgacctcaacatacaactttaaattatgccctatccagcttcaaaccctcaatggcttccagccactgaggcacttggaatcaattcacactgcctgcgggcagtcctgcaatacaatcgattcacgctgcctgcgggcagtcctgcaagacaatagactcacgctgcctgcgggcagtcctgcaagacaatagattcacgctgcctgcgggcagtcctgcaagacgatcgattcacgctgcctgcgggcggtcctgcaagacgatcgattcatgctgcctgcgggcagtcctgcaatacgatcgattcacactgcctgcgggcagtcctgcaagacaatcaattcacactgtgcagtcctgtgatataatcaattcacactgtgtgcaggcagccctgcaatacaatcaactcacactgcctgggggcagccctgcaataaaatcaattcacactgcctggaggcagccctgcaatataaccaattcacactacttgggggcagccctgtgatacaatcaattcacactgtgtacaggcagccctacaatatcaattcacactatcagagggcagccctacaatctacacgggggacccctgcatctactctttccttggcctggatacaggtcccagctgcatgtggctgacccctttctcatccctcagcctcctgggaaagccttccctgactaccctgcccagcagtcccctctcacccaagggtgctaatcacaatcagacattcctgctgatctgtttgcctgttaactgcctggcccccacaacggacacaccatgaaagcaggggctgtcagcctgggaccccccacagctgaaccctggtaccctcatcagccttcccccgtggcccagtacacaccctcggaatgtgctcatgcaggccaggcgcagtggctcacacctgtaatcccagcactctgggaggcagaggcaggcggagcacttgaggtcaggagttcgagaccaacctggccaacaaggtgaaaccccgtcactactaaaaatacaacaattagctgggtgtggtggtacatgcctgtattcccagctgctcgggaggctgaggcatgagaatcacctgatcccgggaggcggaggttgcagtaagctgagattgcgccactgcactccagcctgggtgatggagtgagactctgtctcgaaaaaaaagaaaaaaacaagaacgcgcttatacaaataggcacagttggcgagaataaatagccaacatccacatgaacgaggtctaatttcactcaaagaaatgcaacttaaaactagacacgattttcttcctttagaatggtatccattcccaaaagtcgtattctggcaatggttttaaaagtgtaatctggtggaaggtgatatgtatcaaagccttgaaaatgctcaacccaccagacacacacacagttagacatgaaggcattcacctacagggggccacttgtcgccatcagcacagcaccctggcacaggggccgttaccaaatgctggagcctgagaccaccgagggccaagggaaagtgcaccagacacaggacaaggcaaagcacagacttgggtcacaggagaactgtaattacagaaaaacacagaagcagatatgcagcagacacaggctgaagtgagacaccccgaaattttagcagtctgggccaggtgacgttacaagtgactgtattttcttctttacagtttacttcccaaacttcctataatgaaaaaaaaactaattttatcatcaaaaaaatcatgttgaagtaactaataattttttacacttacagttacataaaaaagccaatcgagcctgcttcccgtgtcacccttgttcctgtcatgatgcttctgacactgacattcgtaaccttctgcaaagctccaaagcaaggcaggcctgtgcgttctgggcatgctctgagcaccgtgcgtggctcctatgaacaccacggagaccacgctcctccgcagaagacacagaacttcctttaaaaactttcacaggtcattgtcccacacactttactgcaaagtcagaaaatgaaaggctgtgtcccccgaccccatggaacaaggtgcccaccttgccaccggcagcacctctgcccacagtgtctgcagcccccagtggaccagctgacccacaaagcctctgccccaggtgtgcttgggccacacccagcgcccagagaagggttcagctccctggctcctagtgtcctgccttgtccacgcactgtccactcagacctctgaccccaaccccgaaacaattcccttgggagccacagaccttcttactgcagggccctcattctaaaacctaatgtcaaatttgatagacagaaaaaactgtttctggggtttcctgactattcggaaatggtccctccaagatccatgtaccccaacaccaccctacctggctacgctcctctcacaactttgagatcaagatgccacgtgtgccttcctcacatcggcgctttccagtgatgcccagtgggggacacaaagggcccagcaagacctcaggaaggacggacacaggcctacacaccaggccacagacaatggggctcggggggccaacctcagcaagacctcaggaaggacggacacaggcctacacaccaggccacagacaatggggctcggggggccaacctcagcaagacctcaggaaggacggacacaggcctacacaccaggccacagacaatggggctcggggggccaacctcagcaagacctcaggaaggacggacacaggtctacacaccaggccacagacaatggggctcgggggccaacctcagcaagacctcaggaaggacggacacaggtctacacaccaggccacagacaatggggctcggggggccaacctcagcaagacctcaggaaggacggacacaggcctacacaccaggccacagacaatggggctcgggggccaacctcagcaagacctcaggaaggacggacacaggtctacacaccaggccacagacaatggggctcgggggccaacctcagcaagacctcaggaaggacggacacaggtctacacaccaggccacagacaatggggctcggggggccaacctcagcaagacctcaggaaggacggacacaggcctacacaccaggccacagacaatggggctcgggggccaacctcagcaagacctcaggaaggacggacacaggtctacacaccaggccacagacaatggggctcggggggccaacctcagcaagacctcaggaaggacggacacaggtctacacaccaggccacagacaatggggctcggggggccaacctcagcaagacctcaggaaggacggacacaggtctacacaccaggccacagacaatggggctcgggggccaacctcagcaagacctcaggaaggacggacacaggtctacacaccaggccacagacaatggggctcgggggccaacctcagcaagacctcaggaaggacggacacaggtctacacaccaggccacagacaatggggctcggggggccaacctcagcaagacctcaggaaggacggacacaggcctacacaccaggccacagacaatggggctcggggggccaacctcagcaagacctcaggaaggacggacacaggcctacacaccaggccacagacaatggggctcgggggccaacctcagcaagacctcaggaaggacggacacaggtctacacaccaggccacagacaatggggctcgggggccaacctcagcaagacctcaggaaggacggacacaggtctacacaccaggccacagacaatggggctcgggggccaacctcagcaagacctcaggaaggacggacacaggtctacacaccaggccacagacaatggggctcggggggccaacctctccagtccccaaacacagtccccaacagacaacttctcctgtccccacatgcggctcccaacaaacaatttctcctgccctcacacgcggttcccaacgacaacttctgctccacaacatgacacccacggtgggagaagctgggggcacttcactacatcatcctgcacactgcagcatggcctgctccaggcagaaggcaggcctggagaagagcctgggaccaccgcggactgaccaacagcggacaccaggtactttctcaaatgggagaggggcctcatggtggacaacatgtatctctttgtttttcgaaagctgtacatctttggtgcaaatgttcatttgagatatgtaaaaatcaaaagttttcactcaaaactttcatggtccaaccatggaaatattaagcaccccattttcgaacataacttgacagcacttattctacttcattattccacgcaagaattggaaagaacagctgtgtacgtgtttgcagctgacaccacaatgccatagcaaccgcaggcccacctggaagcagaagcgtccaggaagcccaggtgcacagcactcggcacagaagggcctgcagccaaaagccccctttatttaactgctttattgctatcaaaggcctgattaagtaaacgcccccatcacgctgcctgagccgggcaccacaggtgaacaccctaaacagcaactgtttcctggatgatcgagggcttggaggttcctactgagcaccatgaagaagaaaagcaaagcacttcgggaaccctgcaaattaccccaaatctcaggcaagcttctccagagccctgttacacctctgcttcaagatcctcaaacacagctgctaattatgctttgatcaactcacttacaaccaacaatttataaaagctttcttcaaatttatcccttaagtggaagaaaactcacattatacagtagaaaaggctttggaggtagaacaggaactgtctccattccactctgatttcgggatgcggacacgcccaccagtctgttctgctgagcccggtctgtgctgctctgaccagacgccgcctcccggcctccctgtgctgatgtctaaggggcaacttccacagcacaccggggagcccgggggcagtcctggaagccagggtggctctgctctctgccctgggagaaggccaacttcccaggcgcccggggcctgcctcaggtccatttgccacagaagcaagcgggacaccctctcctacaaagcttctcacaggccctaagaaccagggcaaccgtaacgaacttcaaacgtcatcctctgttcaaactcatagacctctgctgtgaatgcagtgctcgggcacagtaagcagtgaggagagaggctcctaagagcgtcacaggaccccgactcctggctgccactaagccatgagggtcaccagctctgagacaccaaaggcaggtgaggtccatcccaacctgtcaccaagatgactctgttcatcccgaaggcgatggtgacgaccccagccgcggggcagggggcagggaggaagggaagacccagagcggcgcccttgccctatgctaggcagagctgtccagggctgtctttacacagctccccaaaagttctttttctttgttcttttcaaatgtcactcctacctgagtatgtcaaaagaaacaccagattaaggcctctagcctaaagtgagccctccacccaggtccaggcctccaaaggccactgcaaccctcccctatgttggcaaccaccgccccagggtgacccacctcagacctcggtaacttccccattgacagaaccagtcagctgccacaccaaacacctcagtcactgagaaaacatccagtctggattaatgtgtgaaaatcagtgaaaaatgaggggaactgggagagtttggaatagtgagcgccacctgacagctatgttatctggcccaacctgacagaattcacattcttcaccaaaagggcaaccccactttacagctgggtaagccaaggctccgaggaacaacatattcctcccaggtcaaacggcaacagggccctcaagtcacaaaatctaaacttttaggaatgtcccttgtgccagagcactggctgccaccactggccaccagaactcacagctcctgcaacctcaggggtggccgtctgcatgccgccacccagcatgggcctggactcgccaaatccaacccgtcccaacagcgcgattaagggctagtggacattttccccctttccccacagatgggaaccaatgctccagacagcacccacagacacacattcacctgggagtactcatcctaaaacatgcagcaagcacacgccccctaggccaagggatcaaggcccatggtgagaaagtgcttttctgtcctggaatgggaatctacacttgggccaaatcttagagcaaaaggagagtaaattctgcatgaaagcacaatagaccaagatacactgaagaaaatgtgaatttgccaggccaaaagataacctttagaaatgagcttctttaccttacaccgatctgaaaagatctctcaacaatttaccaacatgctaatgtgggtgtcaaatcacctttttcttctttcagctgtaatcacaacctgactatgacgttatgactatcctaagctgtacataactagtgcttttccgtgatcttgggacaactgtgtcatctgcaacaatctcactaaagactgagttttctcatttttcctcagtgaataaaatctaaactctggcacctcaaaccagcaaattacaattacattaacataactgtctttacaacactgtcctgacaaagaatatcatgacagctacctaaaccaaattcaacatacccggtgtgcactatggggctgaaacactcgggcctaaggcttagccttaaagacttcagggtgaaacctctgtcccctcccttctcccacccaagacctccacggagggaaggctgggaagggcaggccctttcacaccccatccaattgccacccgtctgctactccacttgacacccacatgcagctttgagaaccctgcccacccctaatactcccggctcctcctcagtttgcaagactgagttgtaatgagaatgagttattaaccaagcaagagttatttttataagttacttccatctttgttctaaacatttttattacgaaatatttcaatgaaaacggaaccaactagaacaatttaatattctctgatcaatcgattacaggaagtaaccagagtatttgcaatttgccattctgatttacagaattaagttgtactgttcaaaagaaggtactctggtttgggatactggtagttttattgatactttttttttttgctttggttattattgaaacaaataacataatcaaaattcctcatcagtagatcaactgcaggaggccatgaagagatggggtaaatctctcacttttttagatagtagcattcggctccttgaaagcaccgctctcagcactgccacccaaacgtctgtgtgagctgttcctctgtcctcacacacaggaatcacgcacagtcaacactcctacagttgtttttcaagttgtctcttcatcaaacacacccgaccctaaaactgatcttaaaacagaagatggaagtgagtcccaggatcactcatgataaacacagcagagatgccctcttccaaccacgtattccttcacctcctcccagaagaaagagacagatgaggctttacctctgcagtggctcagagcaagaggacctggccagccccacaagacagagtccaatacctacccaaaggggtgcaacaggcacctggcctgcgctgagacacgtgggacctctggaaaaacatttttataaataaagcattgtgacagtttacataatagatcacagccatcaaacatctttttacaacgttactaaagatcagccacgtttcctactaaaaggtcaacatacacataacagcaaaaccaagcctctggcaaaacacccctacaaacgcttcagtaccccaaaagcttgtcgtaaagggcgtctcagcaaccccgggaagtagcttcacagctctcttcctccctggagcactgcagcctagcagccgcccagacaggctttccccacccctgccctgtccagagtctgaccaccagccccgaacctcacatacttggacaagaaatcctttcacttctgaagattctgcaaccctgtcaaagtgaccaatagctccattcagagaggggacgcaggagggacccacgctctccttgcagttcctactactgctgccaccgcgctgctacaactgcacggcacgcgtcaccacaggccggggaggagctcccctgcccagcacccaccacggcggctggggagggacggggagccccagacaaaagcagcaatgctggccaggcaatctttcctgtcaaacttgaggggccctgaggagtcgcagagacagcagactagacaggagcgtgagaactgccaggcggaagtggcgtcggagccccaggcatccgcagcatagccagtatcgccccgagacccctgcacggagcgagaacatctgctgccaccgccctcccactgccctcccgagggggcagcaaccagagtagctaggcgctccttcctttaggcaccaacgcagctctggaagagacagtgacacacacggtgctgaaaccctactccacagcgtggctctcagcaaggctgcgcgccgggaggactctcgcaggatgcgcctgacatctctccctgcctggtggcagcagaggagcccaagccttccatccagagttcccgagcctcaaggagggggcgtcgcgcccccgtcctcgcctggagactgaagaggctcgagcccagggtcaccaaggggcagaaaggctaagtggggacacaggccacacgcctaactgcagaactgagcaggggacagctgctgccactcacagccccaggtactgccctcagctctgcagaccccatcgcctggcccagggagcccctgcgctgagcctaccaacccgggcagggacgcatagggcgggagcaggtaaggaccactccactaagagtcctggctgagccactccgaaacagaccagccccaggcacaggcagccagcgcggacgtcagggacagcgacagggacgcaggctatgccgactccctctggctcactcgcagacagccacccgggctggccccgcacctgggtagagactgcccctcggcctgctccagccacgggcctacgggacagatgaccttagcattccaccagcggagaacttcctggaactggcagctggcgctgctgggagccgcccttccctcccgccccgtgcggccactcacctgggggcagctggaagttctggatgttggtcgggttctgaggcggctgcggcaagcggggggccagcacggtgggcgtcagggtggcccgaatcccgctggtggtggccgtgggcgtccgggacaggctctgggtcactgcgccggccgcgcctttgggcagcccggtgggggtcccgggggcgggcggcgggacggcggccgggctgggcagcgccccttgcatagttggcccgatgaccatgctggccgccgtgctggccgggccgctggccgccagggtctgcgccgccgggggcgccgcctgcaccaccctcttgggcgactcggccttgacccccggcgccggcgccgcagccgccgcgccgggcccgggttggccgctgacccccgcggggcccccggcggccggggcgggggcgggggctgccccggcgctgcccccgttctgggcggcggcggggggcggcacggcgggcgcggcggtcgggggtccggcggggtggccgggcggccgggccagagtggcgggcgcggggggtggcgggggcggggcggcggcgggggcggcgggcgcgggggcggcggggggcgagggcgcggcgggcgcggggggcgcggcggcgcccacgaaggggggcgtctggatgacagtgccgggggcggcgggcttgggcagcggcagcagcgcggcgggcccgttgttgaccaggctgacagcaggtgcggcggcgtggtgcgagttcagcagcgcggcgctcccattcaaagtttgcgcggcgccggggccggcgggcttgccagggccagggccggggccggggccggggccgggcccggggccggggccggcgcgggcggccagcgcggcggggccggcgggcttggcggggccggcgggggcgggctcgggccccgcggcgacggcggcggcggcgggcaccggggcgcaggaccccgcgctgccctcgggcggcggcctcagcttcgcggcgggcggcgcgggccctgcggggacaagggggcggcgcggtgagggggggcccgggcgctgcggccccccgccccccggccgcgctctacctgcggggggcggctccggcgccgctccgggcgcgccctcggcgggggcggccggccctgcgcccgcggctccggccgggctgccgctcacaacatggttcccgagcgcgccggcggccgcggcccgcacctcgggcgtgcgcggcgcgaggtggtggtggtgggccgcgctggccgccagctgcgactccagcgagcccaccaggtcgctcaccactttctcgtccacctcgctgttgaagaagacctcgtccagcagatccgagcccgccgccatcttttttcctcggccgccgccgccgccgccgctcgggccgagcgcgcctgggcgaggaggaggttccgactggggcgggcgctgggcgggcggggggcggcgcgcggccggcggggggcgggggcgcgcggccggggggcgggggagcgggggtggcggccctgcgcaggcgcggagaccgcgggcgcccggcgattggctgcggcgcgcgcttaaaaggcgcggccaatggctgcgagcgctagaggccggggcgcgggcggtcggccggggtgcggcagcagcggcgggaagcgcgggggctggagctcaggggcgcgggcgccggggcggtggcggacggggagggggccgccgggcggggcgcgggatgcgggaacggtgcgctgggccgggccgaggcgggcgcggggcggcgacggggcctcgctctttgtctcggctcgctccaaaatggctgcggcggcgctgacgggagcgccgggcgggcgccgtgcgcggtggcagcggcggcgcagggcccgtccgaggcccggggaacagcgcgcggggatgccggggcgccgccgggcggcgcgcaggccctggagtggatgggcctgggaggcgggcgggaacggggaggggactgtcgcagcgcgccctggggacggggaccggcgcccggcccctccaagccgccgcggggaagctgggtccgcctctggctcagccggtcccgggcggtggggaggggtcctgcgcgcacggctcttctcgccctccaatcgtgaccacccctggcccttccctccatttttaatcaataaacccagccgccccgggctgactgtccccgcacccagctgccttggagacaggagtgtcgtataagcccgtaggtaagagcacggtgcttgccaggcgccaaacgaagttcccgagcctgaagccggcacgtctggaagtagctttttttaccttctgctgggggaggggagtaagttacctaaagtgttcccaagcaccttctctctagaaatacttcagtaaaagttccagtcccctctttctgcgtgttttattttccaaccaaaagatggtgttattggacatttctagtggttttcctttctctcatttcttcctaagagcccagaataggtttcagagagacgcttccttgcctcggacctcactggggccaagaggccacagggtcagtcttcgcagctgaagacagcgccgcaataagcagagacctcgggacgatgaatgacgttgctgacaaagaaaatgatttttttaattgctttaacaaaggagactgctagtctcgaaagcagacccgaactggacccttgtgcctgttcgaactgtagccttgcaaaggaatggacttactgataactggaatacgggacttcaccccaggcttgtttctcgacagcagcagcagccaatgagcattgaggacggagcctaggagaggtgcctcccctataggggaacagtgtttgggggaaatcactgcaaacgtacagctggagttttgtacctgaactttggctcccagaaggcaggaaaggaaatgaatgaagcaagctgagtatggcggggagggcccctgtgggtacacctacggagcaccttgagctcagtagggggacagtctgagttttccagaaagaacagaaatataaagtgatgattaaatctcgggatttttaatttttgagtgttgacaactaattagaacatttttaaagcaggtcaaagcacaggcaggctaactggccccacgcacaacttgcaaggtggggcgcaccaggctcactgcacagcccatacccacagacccctcagattggagtcggggcagaagcagaacgcaggactcgcaggaaacagaccaggttccaaggcccccagggtcccaaaggctggggtaactgaaggttcccacgctcaggcctccactcttcaagtccgctgctactccactgagatctgtaatgagtctcctgccatctacgcacagtggtgactcctcttctccaaggccccgccaggagtctttcattccaacgtgttcgcaggatcttctggggaaccgtccagcctggcagctgcaggaactgcgagaagttaagggtctgtgcccacctattccagcttcccttgcaaggagggtgttgggcaccagaaggccctggggaaagtgggagccgcagacagccaggcagctcttctatgtctggggtttgcaggagcactgccttccggggggggggggaggggaggcgggtgaggacagcacgtgacttcccctcctaatgttcatgtggtggggagtcaccctgggggcctcccgccaaattttagtatctctgtgattttagttgttgccccaagcagttaggacttgtgtagtttgaaagaaaaatctcacccagcataaaaagagaaaagggggaattgtaacaaatgttaatcataagcactgtttcaacccggaaaaatgtttgctgccaggctgtgggcaaagaggtggcctcggcggctggcagctcagtgggccttccaagtttactaagcagggtcttgtatttttaaataaaatagagcatcagacacgctcacttaaatataaaaaataataaaaacaagttttgaattaagtttaagacacattaagaataaaacaaatctaagaataaagggaatcagtgatttccaagctgcaggctgtgtgaaagttctgtggtgtttgttaggtgacctgtgcttttattgtctgcctgacagccctcatcataaaacaattttttaaaaaaaaagccagcgccagctcacgcctataactgcagggttttaggaggctgaggcaggaggatggtctgagcccaggagttcaagaccagcctgggcaacaaagcaagacacggtctctactaaaaacaggtttttttaattagccaagcgtggtgttgtgcacctgtggtctcagctatttgggagattggagcagaaggatcacttgggccctggagttcaaggctacaagtgagctgtgatcgtgctgctatgattgtgccactgcgctccaggctgggcgacagaatgagaccccttccccccacccactccgcaaagaaaaaggcgtgcagctagatagcagctgaatgtttttggggtgtccaccagccccgctggcagcgttcgtcagtcttgcagactcaggggggatgtctctggtcacaaatgaatccacatcccagggagaaacttgtggccacctaattgctctgtaaatgcagagggatgcgtttctcaaggctgccttaacgaatgatcacaaacgtatgcaacttcaacaacaggtggattctcacagctgtagaagccagaaccagggtgtgggcagggctgcactccctctagaggctctaggggaggatccttcctgcttcctccagcttccggtggctccaagcattcctgggcttgtggtcacatcactccagtctctgtcttctcctgaccttctccctgtgtgtctgtgtcctctccttttataaggataccagtcattggattcaagacctccctaaatccaaaacgatttcatcatgagatcctttaccaattatgtctgcaaagcccctgcttccagataaggtcacatcctcatgttctggtggatatggtttgaggggacactattcaagctagtatacgggatggctacttactgttcacttacagggagacctttggtaagaggcacttagcctggccccttcaccctgggacacaagtctggggaggctggagcctgagacagtagcctgtgacttgagagttccggagtagagaagtccactggccaagacacctccaacccctgccctgctttcccaagaaaatgaggattctcagatctgctcggccaggactctctcgccagggtcagggcttggccaggcactagcattaatcaggcctgacacgtgatcaagggccaggtggagcctgttgtacagatgaggggggactggagcttgaagttaagtcagcagcccaggtttcattcttggaaggggcagaaaccttggacttggaccccaaagctggcagagctggcactgcgcagttgaccagcccatgcatccacacaccaggcgccacggattagatgcctgctcactaaattatagtcaagagtcaggcctgcttcctccctgaaattgacccagatctcccaagcggggctgtctgcaaactcttgagtgactcatttacaacagcctcttggctgactcccacaaatggctaaccatagccatcgcggatggattttactagcttaactcagacagcagcgcatttcaaagctcaggagtaaacggcgttgtcctgatggcactccaacaagtcagccttcctgggacgcttcctccttcccaaggtgcaagcaagaaatgacctttccggtgagagaagcctgtggcctctagactcctccctaacctggaaaggtgcaacgctactgggctccactttctaagcacgaggtccacccaggagtttcttaggagtgctattgttgctttggttacttcctaaaataactttccccatattctgttcacatacccagtttataaaacccaagcacctcctggctgggcgcagtggctcacacctataatcccagcactttgggaggccaaggtggccagatcatctgaggttcaagaccagcctggccaacgtggcaaaagcccatctctacaaaaatacaaactgtagccgggcatgatggcaagtgccagtagttccagctactgagcccaggaggtagaggttgcagtgagctgagattgtgccattgcaatccagcctgggtgatagaggaagacactgcccccctgccaaaaacaaaaacaaaaaaaccaccttcctaaaaacctttagttccattgcaggtgctttggaagatttaacaaaccacaggtttgtcattggtaaagtttgctcagtaagcatagttaggatgggacatataaagctaagataatagatgctgaccatcaagcgtcaatttgagtgtaaaaaatgaaacttttaaagtaagaccctttacaagagcatcaaaaaccaaatacctgaatatcaaactaacaaaaagaaatgtaagacctatagtcagaagattgtaaaccatgattgagagaaattaggggaaaaaaaatacacagagggatacactgggttcgagtcagaggctcaataccgcattgccaagtcaatcctaagccaaaagaacaaagctggaggcatcacactacctgacttcaaactatactacaaggctacagtaaccaaaacagcatagtactggtaccaaaacagagatatagaccaatggaacacaacagagccctcagaaataataccacacatctacaactatctgatctttgacaaacatgacaaaagaaatagggaaaggattccctatttaacaaatggtgctgggaaaactggctagccatatgtagaaagctgaaactggatcccttccttacaccttgtacaaaaattaattcaagatggattaaagacttaaacgttagacctaaaaccataaaaaccctagaagaaaacctaggcaataccattcaggacacaggcatgggcaaggacttcatgtctaaaacaccaaaagcaatggcaacaaaagccaaaattgacaaatgggatctaattaaactaaagagcttctgcacagcaaaagaaactaccatcagagtgaacaggcaacctacagaatgatgggagaaaatttttgcaatctactcatctgacaaagggctaatatccagaatctacaatgaactcaaacaaatttataagaaaaaaacaaccccatcaacaagtgggcgaaggatatgaacagacacttctcaaaagaagacatttatgcagccaacagacacatgaaaaaatgctcatcatcactggccatcagagaaaggcaaatcaaaaccgcaatgagataccatctcacaccagttagaatggtgatctttaaaaagtcagggagcaacaggtgctggagaggatgtggagaaataggaacacttttacactgttggtgggactgtaaactagttcaaccattgtggaagtcagtgtggcgattcctcagggatctagaactagaaataccatttgacccagccatcccattactgggtatatacccaaaggactataaatcatgctgctgtaaagacacatgcacacttatgtttattgcggcactagtcacaataacttggaaccaacccaaatgtccatcaatgatagactggattaagaaaatgtggcacatatacaccatggaatactatgcagccataaaaaatgatgagttcatgtcctttgtagggacgtggatgaagctggaaaccatcattctcagcaaactatcacaaggaccaaaaaccaaacaccgcgtgttctcacccataggtgggaattgaacaatgagaacacatggacacaggaaggggaacatcacacactggggcctgttgtggggtggggggagcggggagggatagcattaggagatatacataatgtaaatgacgagttaatgggtacagcataccaacatggcacatgtatacatatgtaacaaacctacacgttgtgcacatgtaccctagtacttaaagtataataaaaaaatttaaaaaaaaagagtcagaggctcaatattgtaaaaatgtcatttctcccaaaatgatctacagattgtacacaaaatgaatatttaaatccaagcttttttatttatttatttacagaaatggacaagctgggcttctgtttccggtatggtggagtaaacgcctattgaactaacccttccaaaggcagcactataaactctgggcaaaataggaaacaacacttacctgaagtcaccagagcgtgaacacagcaggcacattctgaaggtgtcaacacttggaagaggaaaacggtaccgggttttcacagctcctagactaaagtcaggtaacaggccatgccatgcagggcaaataaaactccaataaaaagccataggtttttctggctagaaaagctagaagacaagtgtgatggttaatattgagtgtcaacctgattggcttgaaggatggaaaatattgatcctgggtgtgtctgtgaggatgtttccaaagaagattaacatttgagtcagtggactgggagaggcagccccaccctcaatgtgagtgagcaccatctaatcagctgccagcatggctagaataaagcaggcagaagaaggaggaatgagcagacttgctgagttctggcctccatttttctcctgtgctagatgcttcctgccctcaaacatcagactccacgttctttggcttttggactcttggcctttgtgatttgccaggggctctcaggccttcacccacagactgaaggctgcaccgtcggcttccctacttttgaggttttgggactcagactgatccactactgacttccttgctcctcaacttgcagacagcatattgtggaactttaccttgtgatgatgtgagtcagttctccttaataaactccccttcctatatacaactatcctattctgtccctctagagaacgctgatcatacagtacattggtaccagaagtggggtgatcagccagctacttggtggcgggttgattatattgaaactcttccaccatggaaagggctgtggtttgtcctcaccagtatagacacttactccagatatgggtttgcctatcctgcactcaatgcttctaccaagactaccatccgtggactcacagaatgccttatccaccatcatggtattccatacagcattgcctcttaccaaggtactcactttacagctaaagaagggcagcagtggactcaggctcgtggaattcactgcttgtaccacattccccaccatcccaaagcagctggattgattgaatggtggaatggccttttgaagtcacggtcacaatggcaactaggtgagaatactttgcaagactggggcagagttctccagaaggccatgcatgctctgaatcagcatccgacatatggtactgtttctcccatagccaggatgcacaggaccagaaatcaaggggtggaaatggaagtggcaccactcaccatcacccctagtgacccactagcaaactttttgctagttgaactaaccacaacctcttgaaagtatgggagcatcgcagaaaggagagagctgcagatccaaattctgttgatactctttgtctaaatctctagttgagcactgaactacatgtatgggacagactccaagcaactcgacctagaataaaacaacagaaatgagatttgagccactgtccaagggactgggtttgcagtctcagttccatcaagccgattgtttgctaccacacacacacacacacacacacacacacacacacacatatcaatgctctactccaaactgtcacaatgttcaggataaaattcaaaattactgaatatacaaagaaaaaaattgttatacattctccatcctactggaaattgacccgataggactcagattgatgaattcgcaaacaaggattttaaagcaactattgtaattgctgctgtaaaggaagatacacttttctttttttgagacagtctcactctgttgcccaggctggaatacagtgagaccgtctcagctcactgcagattttgactctcagactcgagatcctcccacctcagcctcccaagtagctgggactacaggtgtgcaccaccacacctggctaatttttttttttttttttttttttggtacagacagcagggtttcaccatgttgcccagactggtctcgaactcctgggctcaagtgatccacccacctctgactcccaaagtgctgggattataggtgtgagctactgcacccagccaaaaatacacttttaacaagattttaaaatcgcaacagataattagaaacatttttttttgagacagggtctcactctgttgcccaggctggagtgcggtggcacaatcatggctgactgcagccttgacctctcagctacggtgattctcccccctcagcctccctagtaactgggactacagtctcccgccagcatgcccagctaactcttttgtattttttgtagcatggaggattctccatgttgcccgggctggtcttgaacacctggcctcaagcaatcctcctgcctcagcctcccaaagtactggggttacaggcatgagccaccatgcctggcagaaactgtatttttaaaatggaaattttagaactgcaaattagaatatattaaatataaagttaactgaatgagtctaacagaagagtggagattaactcagttaacttgaagataaatcaatagaatgtatccaatctaaaaaagaaaggatggggggaaaacaagaagaacctcaggacctgtgaaacaatatcaaaaagcctataacatgtgtagtcaaaattacaaaaagagaggagagaagaaatgaggcaggaaaaagtatttgaagaaacactgcctagaatttctataataagagacaaatttacatatttaagaagtttcattatccccaactgggataaactcaaacaaaaccatgtgtaggtacatcatagtcaagttgctggaaagcaaatctaaaaacaaaattcctaaaagtaactgtacaaaaacacatttcaagtccaggcgcagggactcgtgcctgtaatcctagcattttgggaggccaaggtgggccgatcacttgagaccaggagttcaagaccagcctggccaacatgacaaaaccccatctctacaaaaatacaaaaattagccgagtgtggtggtgcacgcctgtagtcccagctgcttgggagactgagaggcaggagaatcacttgaacccaaggcagaggttgcagtgagctaagatcatgcaactgctccagcttgagcaacagagtgaaactttgtctggagaagagaaaaaaaagaaaatttcaggcaggggaacaaataaattaaaactgatgacttctcatccgaaactatggaaaccagaagagagtggaagaacatctttaaagtattgaagtaaaactttttaacccatttgtagactgtcgaactatctttcaagaatgaaggtaaataggccgggcgcagtggcttgcgcttgtaatcccagcactttgggaggccgaggtgggcagatcatgaagtcaggacatcgagaccatcctggctaacacagtgaaaccccgtctctactaaaaatacaaaaagaaattagccaggcgtagtggtgggtgcctgtagtcccagctactggggaggctgaggcaggagaatggtgtgaacccgggaggcggagcttgcactgagctgaggtcacaccactgcactccagcctgggcaacagagcaagactccgtctcaaaaaaaaaaaaaaaaacagggtaaataaacacattttcgcataaaaaaattgacataattcatcaccaccagacctgttttataagaattgctgtctgggcacggtggttcatgcctgtaatcccaggactttgggaggccgaggcaggcggatcacgaggtcaggagatcaagatcatcctggctaacacagtgaaaccccgtctctactaaagatacaaaaaattagccgggcgtggtggcaggcgcctgtagtcccagctacttgggaggctgaggcaggagaatggcatgaacccagaagatggagtttgcagtgagccaagattgtgcgactgcactccagcctgggcgacagagcgatactccgtgtccaaaaaagaaaaaaaaagaattgctgaagaaatttttcaggctgaaggaaaatgatcccagatggaaatttgatcatcaggaaagaataaaagcatcagaaatggtaaatagtagattaaattttaaaaaacaattttcctcttactttaaaatatatgtcagtataaatgaaaaattacaacatcaaactgtgagattttgactctgtagatggaatacactcaactgtagcaaaaaatgaaactatgatattggaagttttctacattttatatgaagtggcacaatattaaagaagactattataaattaagaatgtgtatgataatccctaaagcaaccactagaaaagcaacacaaagaggtatagataaaaatccaatagataaaatagaatgctaaaagttttcaaataatcccaaaaaagcagaaaaagaggaaattttagaaggaatgaacataggacaaatagtaaaatgatagacctaaattccaccaattaatcatattagattttttttttttgagatggaatctcactctgtcgcccaggctagagtgcagtggtgtgatctcggctcactgcaacctctgcctcccaggttcaagtgattctcctacctcagcctcctgagtagctgggattacaggcgcacaccaccatgctcagctaatttttatatttttagtagagacagggtttcaccatgttgcccaggctggtcttgaacttctgacctcaggtgatacacccaggtgatctgccaaccttggcttcccaaagtgctgggattaaggacatgagtcaccgtgccaggccttaatcatcatattagatttaaatgcattaagcacgtcaattaaaaaggatagaaagacaagactacagatttcaagagagatgctttagaaaagatatggtatgcaaacagtaagcctagcaaggctaggtggctatgttaacatcaaataaaataaacttcaacacaaagaaccttctcagagataaaaagagacactgcataatgataaaatggttaactcataagaagaaagaaatgataaattgatatgtgcctcaaaacagtttcaaggccagacatggtggcttaggcctgtaatctcagtgcttttggaggctaaggtgggggagccacttgaggccaggagtttgagaccgtcctgggcaacatagtgagacccccatctgtacaaaaagtttaaaaattagctgggcatggtggcacacacttgtagtcctagctacttgggaggctgaggtgggaggatcacttgaccaggagtgagaggctagagtgaactgtaattgttcaggcaggggaacaaagaatcaaaactcatgacctcgtcagaaactatggaaaccagaagagggtggaaaaacatctttaaaatattgaaatgaaactttctaacctctttgtagactgtcaaataacaggcaaaacttttagaatgaagcatgcatttaatcttagggcaaaaattctctcaaaagtaagcacacaaagtgctaaacctgtccaggcaccgtggctcacgccagtaatcctagctctttggaaggctgagatgggaggatcacttgaggccaggagtttgagaccatcctgagcagcatggtgagacttcatctctaccaaaactttaaaaattggccagacatggccaggtgcagtggctcacgcctgtaatcccagcactttgggaggccgaggcgggcagatcacaaggtcaggagatcgagaccatcctggctaacacactgaaacccctctctactaaaaatacaaaacaaaaaaaaaatttgccgggcatggtggtgggcacctgtagtcccagctactcggtaggctgaggcaggagaatggcatgaacccaggaggcggagcttgcagtgagccgagatcacgccactgcactccagcctgggtgacagagcaagactccatctcaaaataaataaataaaattagccacacaaggtggcaaacacttgtagtcccagctacacaggaggctgagctgggaggatcacttgagcccaggggttcaaggctgcagtgatgtatgattgcaccactgcactccagcctaggcaacagagtgagaccctgtcccatcccccccaaaaagtgctaaaccctataaaggaaaaaaaattgataaattgtgtgacgttaagaactcttcatgggctgggtgcaatggttcacacttgtaatcccagcactttgggagaccaaggcaggcagatcacttgagctcaggagtttgagaccagcctgagcaacatggcgaaaccccatctctacaaaaagtacaaaatgagttgggcatcatgcatgtgcctgtagtccctgctacttaggaggctgaggtaggaggattgcttgagcccaggaggttgagtctgcagtgagccatgatcatgccattgcagtccagcctgggtgacaaagtgagaccttgtctcaaaaaaaaaaaagaacctctcatcaaaaccattacaagaatggaaagacagctgacagagtagaagacatatgcactgtacaaaaataagcgaaagactggaacaggcacttcacaaagaggatggccagatggccagcaggggtgtaaaaagatgctcaaccttattagtcatcaggggaatttgaattaaaaccactgcagacccaccagcacagccaaaattaaaaggactgacaacacctagtgttggtaaggagcactcactgaggagacaggagtcagttcagccactgttgaaattgcttggccatttccactaaagttgtataactgctcagcatctggctcagcaactctactccatatgcacccagaagaaatgagtccttctgtgccccaagagaagtccctggacatcccagcagcacgttaatattcaaaacaggaacaaccaaaatttccatcaacagtaaaatggagaaataaatggtaacctgttcatctaacagcattagatgggtgttgtattagttcatgctcacatttctataagaaaatacccaaaactgggtaatttattttattttattattttttgagatggaatctgactcttgttgcccaagctggagtgcagtggcacgatcttggctcactgcaacctttgcctcccaggttcaagtgattctcctgcctcagcctcctgagtagctgggattacaggcatgtgccatcacgcctggctgatttttctattttagtagagacggggtttcaccatgttagccaagctggtctcaaactcctgacctcagttgatccacctgcctccgcctcccaaagtgctgggatgacaggcatgagccacctcgccgggccaacagggtaatttataaaggaaagaggttgaattgactcacagttgagcatggctggagaggcctcaggaaacttacaatcatggtagaaggcaaaggagaagcaggcaccttcttcacagggcagcaggacgacggagtgagtgcagcaggggaaatgccagatgcttataaaaccatcagatctcgtgagattcactcgttgtcgcaagaacagcaggggggaaccacccccatgatccaattacctccacctggtcccactcttgatacgtgagagagctcactcactgcggcttcaacctcctgggctcaagtgatcctctcccctcagcttcccgagtagttgggaccgcaagtgtatgccaagaactctttgtgtcttgcaggattgaaactctacacccattaaacactaactcctcattctctctccctgaacatatcttttccagtgacactattcaaccttccccagagcaccacattttcattttgcaccagcctctgcaaattctggaactgctcctggctcacatctactgccaagtcctcctgtgtctatgggagaagagtcatccctgtccacaatgacatgtgtgccttcacactggggcaagtgttaaggaaaaatgggtaacttgagtgccacatacaccacatccagctcgcaagaaccagctgttgtgtctcttcccaacgccatgttcagtgacatcacactgacagcttgaaaccagccagggtgggggcatttccaccaaggacgttggcagacgctatgcctcggggggcattggcagacactatgcttcggggctttttttccttagggagacagttattaaacacttagcagtacccacctagatagtcaatgtctgactctagagcctcacagtttgcttgaggtagtaaaacctacaagtcttaaataacttatgaatgttggccaggtgcggtggctcatgcctgtaatcccagcacttagggaggccgaggcaggcagatcacagggtcaggagatcgagaaaatcctggctaacatgatgaaaccccgtctctactaaaaatacaaaaaatagttagccggatgtggtggcgggcgcccatagtcccagctactcgggaggctgaggcaggagaatggtgtgaagccgggaggcggagcttgcagtgagattgcaccactgcactccagcctgggagacagagcaagactccatctgaaaaaaaaaaaaaaaaaaaaaagaatgtcgatgaggccacttttggattatatccaaaagaagtgaaagcagcatctcgaagagatattttcacgctcatgttcatagcagctttattattattttttttgagatggagtcttgctctgtcacccaggctggagtgcagcagcatgaactcgactcactgcaacctccgcctcccaggtttaagtgattctcctgcctcagcctcctgagtagctgggattacaagcgtgtaccacacgcccggctaatttttgtattttcggtagagacagggttccaccatgttggtcaggctggtctcgaactcctgacctcgtgattcgcctgccttggcctcccaaagtgttgggattacaggcatgagccaccgtgcctggcctcatagcagcattatttacgatagccaagaggtggaagcaacccaacggtccaactatagatgaaatggagaaggaaaatgtgcagtggaatattattaagccctgaaaaggaaggaaattcggacacacccttcagcaaggatcaaccgtgaggctgctatgctgtgaaataagccgggcacaaaaaggcgaatgctgtgagtccacttacatgagttatcgaaagcactcaaattgacggaaacagacagtagaatggtggttaccaggcaaggcagggagggtgaaatggagagctttgaatgggtgtagagtttcagtgtttcaagatgaacaagtcctggggatctgttgcacagcaacgtgaatatgctcactgttccccaacttacacttgaaactggttatgatggtaaattttgtctttattcttaactacaatttttaaaaatgttgatgagagactgctgatctgggaattcaggaaacgtgggttttggtccacattctaccatttcctggtggccttaggcaggtcacttgccagctctggactctggtttccttctcaaacaaaataagggttttgttttaggttttccagctcagaaagctgagtctgctcagaagagctggacattccctcactgtctttcattcaagtgtgacatattccgacaagtgacatacatcaacacattctctcaaaccaaacatacctgatatggtctggctgtgtccccacccaaaatctcatgttgagttgtaatccccataattcccataatctccacatatcaagagtgggaccaggtggaggtaactggatcacgggggtggttcccccctgctgttcttgctacaacgagtgaatcccacgagatctgatggttttataagcatctggcatttcccctgctgcactcactccgtcgtcctgctgccctgtgaagaaggtgcctgcttctcctttgccttctaccatgattgtaagtttcctgaggcctctccagccatgctcaactgtgagtcaattcaacctctttcctttataaattaccctgttggcctggcgaggtggctcatgcctgtcatcccagcactttgggaggcggaggcaggtggatcaactgaggtcaggagtttgagaccagcttggctaacatggtgaaaccccgtctctactaaaatagaaaaatcagccaggcgtgatggcacatgcctgtaatcccagctactcaggaggctgaggcaggagaatcacttgaacctgggaggcaaaggttgcagtgagccaagatcgtgccactgcactccagcttgggcaacaagagtcagattccatctcaaaaaataataaaataaaataaattacccagttttgggtattttcttatagaaatgtgagcatgaactaatacaacacccatctaatgctgttagatgaacaggttaccacgtctggccagcacttacctttcacctttttgacagtagcctttctaacaggcattcgggcatccgtcttacccaatttcagtgtacgagtagcattaagtacattcataatggtatcgctgcctcaccatcatccatctctagaggcttttcatcttttaattttgtttcagagacagagtctcactctgttgcccaggctggagtgcacctctttctctctccctctctctttctctccgtctctctgcctctctttctctctccccttcttcttctctccctccctctctccccttctttttctttccttccctctctcccctcctctttctccttctctctctctctctctctctccctctctctccctctctcctgcttccggattgggacacctttcctctgcctgcccttggacatcagactccaggtcgtttggctttgggatctgggacttgcagtggggcctcacagggctcctgggtctttggcctcagattggtgactgcaatctgaggttccaagttccaaggcctccgggcttggactgagcccgccgccaggctccccggttctccggcttgcagactccttgacctctaggagacaagtcccctatcaaacccctcacctctccatggctctgtctctctggagaaccctggctgaagcactcctggaagcagagaggagaatggtgggcacccaagggcaggcgggaaagggaaacctcactcaaaggacaagaagtctctgccggatggacagcagggcgactcgagtgagaaataacgcattacagattcccaaactgccaaaaagtgggtttgccattttctcaccacagagacaggataagtttgtgaggtgatagatgtatgaattagcccgatttgatcatccgccatgtatacatgtctgaaaacatcactttgtaccccataaatatatacaattatttgtcaataaaaaataaaatctttgcaaacatggttaagatgacacattttatgtcacatgtattttaccataataaaaaaaaatcagaaaataaataagtgctaagcgaaataagcaagtcctaaaaagacaaatgctgcgtgatgccacttaaatgagaaaaatctaaggtagtcaatttgacaaggccgggcgcggtgactcactcctgtaatcccagcactttgggaggctgaagtgggaggatcccttgagcccaggagttggagacctgccatgggcaacatggtgaaaccccatctctacaaaaaatacaaaaattagccaggcgtggtggcacctgcctgtggtcccagctactcgggaggatgaggcaggagaatcacttgagcccagggaggtcgaggctgcagtgagttgagatcgcaccactgcactccagcctgggtgacagcgtgagaccctgtctcaaataaaataataaacattaaaaaattaaagtgttcaaatttacagaaacagaaagtagaatgcggttaccagggattggggagagggaaaagtggggagctgttttttaatggacataaagttgcagtttttcaagattgtctatctatagataaagatattgacaaagatatagataaagatattgacatagatataggtattgatatagataaagatattgatatagatataggtgtctccaagtcctgacagcacggttcctgcgaatgtggccttatttggaaatagggtctctagacgtaattaaggatgttgagataagatcatcccggactagagtgggccctaaatccagtggctggagttcttctaagaggaggccgggggagatttgacacagaaatacacagcaggagcatcttacagacagaggcaggggcaggtgctgctgcccccagccaaggagcgcccagggttgccaaaggcaccagaagctaggagagcctgggccagattctcctcggagcctccagaaggagctgacaccctgattttggacttccagcctccagaaccgtgagagatgaaggtctgctgttttaagccaccagcttgtggtgatttgtcacagcagccccaggtcacgctgaaggctccttgttcaaatgtcacggaggatttcaaggcggggtcagcagatgcggatggggcctggtgacttggaggggctgagtctgggaggcctgccagcgcccctgtgttggacttgagtcagcctgcagaattctcagggtctctagagatgtgtgctagttcacaggggaggaggaagcctggactgagggtgactgaggaactgcacagagagacacgcaggggtagagccaggctgaagaggagtcgcactccctgccagttctcctctggacggttggatgtttttcttctacctatgcacgttactttttttttttttttgaaatggagtctcgctctgtcacccaagctggagtgcagtggcgcgatctgggctcactgcaagctccgtcttctgggttcacgccattctcctgcctcagcctcccgagtagctgggactacaggcgcccgccaccacgcccagctaattctttgtattttcagtagagatggggtttcatcgtgttagccaggatggtctcgatctcctgacctcgtgatccacccgcctcggcctcccaatgtgctgggattacaggcgtgagccaccgcacccagccatgttactttttcaatgatgtttttaaaacctcgtttaaacagcttggttccctgtgaaggagtctttggacgaggaggagtggccgccaggaagttcgcattttgcatgatattttgatgttttaccaggagaagatggtcttgtgtgatttatgtcatcaaaattatgtaaaataaaaagccagaccaggtgcggtggctcacgcctgtaattccagcactttgggaggccaaggagggtgggtcacctgaggtcaggagtttgagaccaggctggccaacatggtgaaaccccatctccactaaaaatacaaaaaattagctgggcatggtggcgcatacttgtaatcccagctactcaggaggctgaggcaggagaattgcttgaacccaagaggcggaggttgcagtgggcagaggttgcagtgagccaagatcgcaccattgcactccagcctgggcaacagagcaagactctgtctcaaaaaaaagaacaacaataacaacaaaaaacccagaaaatgaaaaagaaatgctgttaatgaagtttgaacactgatggcagaaagactctgtgtcttaagatcaagcgactgctgcatttcaaactgtccacactcctccaacttcccacaccaccgcaaaaccctctctcctgaccctccaccttggtccccactcatctgagaagggagaggttgtcaaacaccctggccctctgctcccaccatgatgagtggatctgcatctggtctgtccttgccttctttctgcctgttaggacggaggaggtggacttctctccacccatgggatccctcgagggtgacatggaagctgggcacacagagagactggggtcacacagaggcgggggcctggggtttcacagaggctggacaggcttccagggagcagaaatcaaccatcctcatggtgccctgcccggatccctgatccacagaaacagagaggataaaatggttgctgtcttacctgctaagtttgggggtgagtggttgtgtgtcagtaggtagcaggcacccctcactctctaacaacaacacctctgtctccacttctagccgttgggatttacgaagaaagctcagtattaatcactgctaggcacagagcgccttggaaagggaacccctcaggttcccgcagaaaagtgttttaggggtctctgagaccaccggcccatccagtagggagcggaggctcatagctcctgaaggcagtaaaacctgggtaggcacagcagccagttcttgcctcaagaaggaaggagagacacagtccttgggaccccagcccagccaaggtcgggatgagggcagcagccacatcccttccaagaatttgggggtctttaaagaacgactgaggatgttacattgggtggggagcccacaggctgcaaaggaaacagacccgaacgaacaacgcaacagctgtgtccattgcaactcaggctgcggcaaacatctgagaaccatccaaccctgctgagaccaggggcggagcctggcttaccgcaccgggacaagctgctcttgcccagcttgccctgctggtttgccccagccccacgaaaggcaagaggggagatgcaaaacacactcacacacacttctgctcccaagcactcactctcatactcatctacacacgcactcccacatgttcctgtacactcacctgcacacgcactcacacatgctcctatacgctcacctgcacacgcacacgctcctgtacacccacctgcacacgcactcacacgcactcctgtacactcacctgcacgcttacccacacatgctctgtacactcacctgcatgcactcacacgcgctcctatacactcacctgcacacgcactcacacaagctcttgtacactcacctgcacacgcactcacacaagctcttgtacactcactgcagactcacccacacacgctcctgtacactcacctgcatgcactcacatgtactcctgtacactcacctgcacactcacctgcacacgcacgcacacgtgctcctgtacactcacctgcatgcacacacatgcgctcctgtacgctcacctgcactcactcacatgcactcccgtacactcacctgcagacgcacccacacgcgctcctgtacactcacctgcatgcacacacacgcgctcctgtacactcacctacacacactcacatgcactcctgtacactaacgtatacatgcactcacacacgctcctgtacactcacctgcacacacacatgctcctgtacactcacctgcacatacacacacactcctgtacactcacctgcatgcactcacacacgctcttgtacactcatcagcacacacactcacatgcactcctgtacactcacctgcacacgcattcacacacgctcctgtacactcacctgcatgcactcacatgtgctcttgtacattcacccgcactcctgtatactcagttgcacacatactcacacatcctcctgtgtgtatgactgtgactgtatatgtgagctatatgtacatgtgtgttcacacacacacacacacacacacacagatacagtcatacaccacataatgacgttaggggcaacaacggactgcatatataatggttgtcccataagataacagtggagctgagaaattcctttctccaagtgacatcatagccgtcctagggcaatgcatgactcatgcttgtagtgacgtggctgtaaacaaacctactgactcatgtttgtggtgacctggctgtaaacaaacctgtgttgccctcacgtagaagtctagcacatataattatgcacagcacataattcttggttatgataataaacgtctatgttactggtttatacgtttactatgctataatttttattttattttatttatttattttttggaaacagggtctcactctgttgcccaggctggagtgaagtggcgcgatcttggctcactgaaacctctgtctcctgagttcaagccattctcctgcctcagccttctgagtagctgggattacaggtccgcaccaccatgcctggctaatttttgtatttttaatagagacagggtttcaccacgttggccaggctagcctcaacctcctgacctcaagtgatccacctgcctcagctttccagagtgctgggattataggtgtgagctactgcgccagcctattttattttatttttgagacagggtcttgctctgtcacctagggtggagtgcagtggtctgatcacagctcactgcagcctcaaactcctgggctcaagagatccttccacctctgcctcccaggtagctgggactacaggtacgtgccaccatgcctggctaattttttttttctgtcttgtagagacagggtttcactatgttgcccaggctgatctcaaactcctgggctcgagcaatcctcccacctcatcctcctaaagtgctgggattataggtttgagccactgcgcccagcctttattgttattttagagtgtactccttctacttattaaaaaaaaaattaactgtaaagcagtgaggcaggcccttcaggaggtatccagaagaaggcactgttatcacgggagaggatggctcctcctaaggacctccaagtggggcagggtgtggaggtggaggacagtgccagggacaaccctgaccctgtgtaggtctaggctgacgtgtgtgcttgtgtctcacttttaaacaagcaagttttaaaagtaaaaataaaataaaataaaagattttaaaaattagaaagagcttataaaataaaaatataaagaaaaatattttctttatattttcctgcacaatgtgttcgtgtttttagctgttaatacaaaaaaaatcaaaaagtttttaaaagcttataaagtaaaaaagtcgtagtaagctaaggttaatttattattgaggaaagaatatatatacacatatatatgtatacacattatatatatttttggagatggcatctcactctgtcacccaggctggagtccagcagcactatcttagctcactgcagcctcaaactcctgggctcaagtaattctcccacctcagcctcccaagcagctgggactataggcatgtaccaccatgcccagctgatattttttattattattatttttagtagagatgaggtttcgctatgttgcccaggctggtctcaaattcctgagctcaggtggtcctccttccttggcctcccaaagtgctgggattacagacgtgaaccactgcacctggccaaaaaaaaaaaacctattttttataaatgtagtgtagcctaagtgtatggtgttataaagccaacagtagttatagcaatgtcctaggtcttcacattcactcactgactcacacacagcaacggccagtcctgcaagctctatccatggtaagtgccctacacaggtgccctttttatctttgtatcacatttttactttaatttttcttttcttttcttttcttttcttttgagacggagcctcgctctgtcgcccagtctggagtgcaatggcgtgatcatggctcactgcaacctccccctcccaggttcaggcgattctccctcctcagcctcctaagtagctgggattacaggtgctcaccaccacgcctggctaatttttgtatttttagtagagacggggtttcaccatttggccacacttgtcttgaactcctgacctcaggtgatccacccacctcggcctcccaaaatgctgagattacaggtgtgagccaccatgtccagccaactgtaacttttctgtctagatatgtctaaatacagaaatacatattgctgtcttagtccattttctgttgcttataacagaatacctgaaactgggtatttttttttttttttgagacagagtttagctctgtcgcccaggctgtagtgcggtggcacaatctcagctcactgcaacctctgcctcccaggttcaagcgattctcctgctccagcctcccgaatagctgggattacaggcacccgccaaaatgcccatggaatttttgtgtttttagtacagatgaggggggcgggtttcactgcgttagccaggctggtcttgaactcctgacctcgtgatccgcccgccttgacctcccaaagtgctgggattacaagcgtgagccactgtgcccagctgaaactggtttataaagaaaagaaatttatttcctacagttctggaggttggaagttctacgtggaggggatgcatctggtgagggccctcttgctggtggggaacctgcaaagtcctgaggtggtgccggcatcacacggtgaagggcctgagcctgctagctcaggtcttttcttattgctaagccgccagtcccattcttgtgataatccagtaatccactaactcattaattaattcatgaatgaattaatccattccgagggcacagcccccatgactcaatcaccttttaaaggccacacccccaatattaccaccctgggatcaagcttgtatgtgggtttggaggggacaagcagttgagctgcggcacttgcctggagtgctcactgcagtagcatgctggctctacaggctgatagactaggagcaacaggctctaccatacagcctatgtgggtagtaggttgtaccgtgcaggttcgtgtcagcacactccatgatgtttgcataaggacaaagttgcctaacaatacatttctcaggacatagccccatcattaagtgtctcaggacatagccccatcattaagtgacacatgattgtatatgtatatacctcctattggcaccatttcgctggaaaaccctgattaacacagaaggtggtaccaagaagtggggtgccactgtgacaaatacctaaaaatgcggaagcagcattggaactgggtagcggtgtagaggctggaagacttgtgaagtgcatgcttgaagaagccgagattgtcatgaagggattttaatggtgattctggtgagggctcagaaaacaaagaggacgccagagcgaaagcctctgtcttcttagcgaatatgcaatcaatgaccagattgttgggagaaacgtgcacagtcgggtcattctcatgcggtctcagacggaaatgaggaacatgttactggacaatggagaaaagatgatccttattataaagaggcagagaacgtggctgaatcacgctcatgttctagtgttacgggaaaggtagagaacttgccagtgatgaaattcgatttgagttgaggagattgctaagcagtgtgaaaggactggctgggttcctcctgactgcttatagcaaaacgtaagaagagagaaatgactgatgagggaattgctaagcaaaaagtaactagaacttaaagatgtggaaaatgggccgggcgcggtggctcacgtctgtaatcccagcactttgggaggccgaggcgggcggatcacaaggtcaggagattgagaccatcctggccaacatggtgaaacctcatctctactaaaaatacaaaaaattagctgggcgtggtggctcacggctgtaatcccagctactcgggaggctgaggtgggagaatgttgtgaacccgggaggcagagtttgcagtgaccagagatcgtgtcactgcactccagcctgggtgacagagcgagactccgtctcacaaaaaaaaaaaaaaaaaaaaaagatgtggaaaatggtcagcttatccgtccgtattgcaacaaatgagaaagcatagttgacaaagaagactaagggtgtagtcatcaaccagtggataaggagattcgtgtgggtgggaacctcagactgtcagccacccggtgggaatactgcagcttaaactgaaggggaaggagacgggaaggaatgaaggaatgaaggaattggacttcttggatttaacgggtcaggaccatagagctgctctgtgtgaacatgctccattcttcaagacagtggaagaatgaccccataggtgaatccgagctcatcacggctgcctcccaggtttcaaaagggggggtctcacctcactttcggcagaccagatgacctttgcccgaagccatgggggcctgcccctgcccagcagagccctgggggtgggacccctgcctggcagagctggtgggtggggttgccgccccggtgcacctggcaggaagagcatggagccaaagaatactattttggcttggagttttccttggagttttccaagtccaagtttcaacttgcttggatccaccgcttccttcttccctatttctcccttttaggatggaaatgtctatcctatgcctatcccaccatttttgtttgtttgtctgctttcaaaacagagtcttgctctgttgcccaggatgaagtgcagtgcatgatcttggctcactgcaacttccacctcctgggttcaagcaactatcccacctcagcctccccagtagctgggattataggcacccgccactatgcccagctaatttttgtgattttagtagagacggggttccgccatgttggccaggctggtctcaaactcctgacctcaagtgatctgcccaccttggcctcccaaagtgctgggattacaggtgtgagccaccaggcccagccccgatcattgtattctggaagcacataacttgtttggctaaaaggccttgaggctggaggggaattttgccttgtaagaattgttccctgagtctcacctggatcggatttagatggtatttagataagacttggagctcacaccttcagagtagaagctgcagcaagcctaaggcatgcaaagctgttgggatggaatgaatgcattttacatgggaagaacagatacatttgaagaggttgggatggaatgtttgtgtgtccccacagttcatatgttgaagtctgatctccagtgtgatggcatctggaggtggggcctttgagaggtgattattatcagctgacgccaagagggactagcgccctatgagagtctccagagagcaagtctctctgctctctaccacgtgcgggtacactgagatgccgagaagggtgcaagctggaagagggcccccacaagaacccgaccatgctggcacccagatctcaaacttccagcctccagaactgtaagaagtaaattcctgttgtttataagccacccacccagtctatggcactttgttatggcagcccatagagctgtcatatgcgagaccaaggcaggtgagctaaacgaagtctctcactaagggaagccatcaagaaagcttcctggggctcagagtgttagttctattctacctcttgggtggtgtgttgggtgcatgggtgtgcactttcttcttattttttttttagttgcatgtgtgatatatatactcttttatacacactctgatatatgtaatcttttaatattttttttttgagacggagtttcgctcttgtcacctaggctggagtacaatggcacgatctcagctcactgcaacctccacctcctgggttcaagtgatcctcctgcttcaacctcctgagtagctgggattacaggtgggtgccaccacgcccagtgaatttttatatttttagtagagacaaggtttcaccatgttgcccaggctggtctcgaactcctgacctcaagtgatccagccacctcagcctcccaaagttctgggattacaggtgtgaggcatcacgcccagcctgcactcttctaacattaaaaaaaattatttgttatttattttttttgagatggagtcttgctctgttgcccaggctggagtgcagtggcacaatcttggctcactgcaacctcttcctcccaggttcacgccattctcctgcctcagcctcccgagtagctgggactacaggcgcccgccaccacgcccagctaattttttgtatttttagtagagacggggtctcaccatgttagccaggatggtctcgatctcctgaccttgtgatcagcccacctcggcctcccgaagtgctgggattacagacgtgagccaccgcgtccggcctagaaacatttaacattaaacagtaaagcagatgctcacatgcacagacttgcgtatgtgcctgcacctgcacaggtgtgcacacaggtgtgcccagcctctctcaggagctctgccagcaggtgtcagtgggacccagccgcctgcatattctgcaaaggtcattcagatgattctcacagcccccgagattgagacctcctgctctacaacaaaaggtgctcgtgctctcaaatcttttccctcaggtttcccaaaatgagggataattgaaacacatcatttgctcttcgcatgagaagcaaaagtgagtaacgtgctgtacgaggctagaattaatgaagaggctcatgaatgtaatctcatacattaaaacctttcccaaattcatgtcaatctgcattgtaatgttcatattttataaaatggggtgtggggttcagaaacagtttgcaaaatgaatgtcctgcctcgataagccaggcacattttttttttttcagcttaaaaaacaggaaagccagaagcggtgactcacgcctgtaatcccagcactttgggaggccgaagcggacagatcacctgaggtcaggagttcgaaaccagactggccaacatggtgaaacactgtttctactaaaaattggccaggcatggtggtgagtgcctgtaatcccactacttgggaggctgaggcaggagaatcacttaaacctgaaaggcagaggttgcagtgagccaagatcatgccattgcactccagcctgggcgacagagcgaaactccgtctcgaatagaatagaatagaatagaatagaatagaatagaatagaatagaatagaacagaacaaaataaaataaaataaaataacacagcagagggaggtcagaagcagtggctcatgcctgtaatcccagcactttgagaggctgaggaaggaatcacttgagaccatgagtttaagacctgcctgggcaacatagtgagacccctgtctttacacaattaaaaaaaaaattagccaggcatgatggtacacacctgtagtcccagctactcagtaggatgaagtgggaggatcgctgtaggtcaggagttcaagactagcctaggcaacatagcgagacacagtctccaccaaaaaattaaaaattagccaaacatggtggtgtatgcctgttgtctcagctactcgggaggctgaggcagaaggattgcttgagcccaggaggtggaggctgcagtgagctgtgaccatgccactgcattgcagcctgggggacagagcaagatgttgtctcaaaaaagacaaaaacccaaaaccagacagaaagccttgctctggaatggatgagggccagaatctgctcattaggagcctggtactgggcctctatcctggacttgagttgcaggagaaaggaccaaagcaccaagttgaaacatagaacaggtaatccgagacctcgccggacacatgcacatgtctgcactctcacgcgtggtgcacacgctgcacacccttgcatacacacacatgagcacgctcatgctcacacatgccctggcccaccgccccacctcgacctctccctctgggaccccagtcctgcctcctctgctacaccccctccccaccacactcaccagccctcccctgggggcctgcggcagggaccacaggggtttcctaaggtcccctcattcttcgccatctgaggccctctcagatctgctggcagacatttcgggggaaagaggaggggccaggagctcctagcagctccccctctgcaaccttgactggctctgcagacacctcctaggtgccacgatgggccgggcacgttccaggcgccagggacacattcccaccatgcagggagacaggagacaagcacagttgtgccggcaggaggagccagcagggctgagagggggaggacaggagccagggagggcttccctgaggtgtcatgggcacagacactgtcaggcgtggggagggatgcactctgcagggggatctgcactgcccaggccaggagccgagaagtggatccaggaagggctgggccctgcggttacctgtcacccagaatggcactgggcgcctcttctgtccccgccggctgtgtggcccgaggcgggccctggggcttgggtttctcatccatgcagtagggacagtgtcccacctctgcgtccctcatggggcatggcaaggaccgggggaatggagggcctgcctggtcggatcagagagcagggtggggggtggcggcggtctcaaagaggaaggaaggcccctaggctggggaagtcgtgttgatgccaccacgggcacagccaaggacaaaatgccctgggggcctcacgggaccagacccttgggtcctcccaccaggggtgggagaccatcctgtccatgaccacgtcccacgacatgacttcagttcccgcctgtcctcacactggggactccccctgctcactgcacccactgtccagtgatgggtaatttgagccccagcagaacagttgtcaagaggctgctccgggaaggccacgcaggcaccacactcagggcaaacgtagtggagtagggggtgggaggcgattgcggacatgggcatgagggttcccaggaagagggtgggcatgaggcaggcatctgcatgcttttgggggggcatggctctgaaggggcaggtgcaggtgggagagggtgtggggagagagaattctgtgcccccatgcagggggatgggtgttgccagaggcagggtgggggcaccgcggacagtcgggcggagggcacattccaggaagcgttttacacacaggcagacaggccccactgcagggaaatggaagatgggaagggcagcccatggcttttctggtgtcagaatggatttctgaaacacagagtgaacacagtcatccgaaaagcccagggttcaatgtgctggagcccagatccgtgggagcccagggtggggacctgggcctggggctggggctctttggacactggccaggaggaagcaggagaggagccaggtagggccccgacggcctcacgggctgctcaggacagaccctgcagccaggacgagcgtagggctccagcaaagctggacctgcagcgtgccgttggggaggggcctgcctggggtccactgttccctcagtcacaggctccccagcgtcccttcccgcaccagagtgaacggcaggaaaagatgctgcagcggcgcccggcctgcacctcctcccaggtgaatcttgtggaaaaggagatgtaggcctagacaaatcttttgttttagaacatttccttcttgaaaaaaagaaaaagaaaaaagaaaccaaaaaaacccttgtcttccagggagatcaaaaggtgatggtgaaggagtcccgcaagctgggagtttaaaaatggaacaggccgggcgcggtggctcacgcctataatcccagcactttgggaggccgaggcgggtgaatcacgaggtcaggagttcaagaccagcctggtcaacatggtgaaaccccatctctactaaaaatagaaaaaattagctgggcacggtggtgggcgcctgtaatcccagtgactcaggaggctgaggcaggagaaccgcttgaacctgggaggcggaggttgcagtgagccgagattgtaccactgcactccagcccaggtgacagtggaggctccatctcaaaaaaaaaaaaagaagaaaaaagaaaaaaatagcacagaactgggtcaggtgggtttgtcctgccacagacagggtgctgcttagaaccaaccagctttccccagaactcacctcctgccacttcatggtggagggggtggctgctgggttggacccaactccaccatcttccagctggtgaggatttccacgccattccaggtcaccccccgacctgttgggagccggcgtcttggacaggggaaagctgaacagggcagtgaagaacagtctagaagcatgttcttcacttcaagacccaggaccccatggacatcctgcctacagatcgccccactagccctgcttcagtcactgggcatctggcagcactcgataggtgccatgtggtactgcctgctctgtgggtgcagctgccatgccgaggccgtcccctctgtcctctccaggctctcctgtaacctcccagctctgctctcccatgccctccctcaacccagcccttccgtgggggctcctcctggctctccccggcctgtccctccacaccccctttcagaccctcacagctgcctccccacaccagccttcaggggactctgcagcccacctctctgcccactccttcctcctagattctcactgaagcttcccccgctctccctagacccgcagctcatacccccggctacttattagaatgcctggcaagcttggataaaaccccatactcagccacacccaggcccattaaaccacacacctagagttggcctggaagcctcgaggtacatccagggtgcagcaggtaggaggcctcagtcccagaccaaggaaggagcccttaccatagagtgcccagccccaccccagccccgatgctcaccagcgtggggattgtatgttgacccacactcaatgagtgtctgtgggatcagtacatcagtgatggggggatcagtccatcaacagatcaatgaatgaaccaatgactggatgatctgagtggccactgctattggctgagacggcttctctcaggtttgtcctcaccacctgcttgctgtctgagcagcccaccctcctccgtgcacccctggacccacctctgcttcccatgggtacacccttgcctctgatacagacggaaatcctgatggcgacagagctgactctcctaaggcatcctttgcatctgcatcaaaacgatctgaggccacagatgaggccacgaagagaagaacgtggccctgcctgctctggattcccagccccacggccctgctgtcctgctgctgcttccctgcacttcctctgctcacccgcccggcagagggtggtcccctgggcccacgcaggcctgagcagcgcactcctccaggctttgggtgtaagtcgttcttgcggtcagtttatcctgtgtctgcctgttcccatcccaaacctccccagggactctagaaagcgtgtcctgggccacctttccacgtggggagcaagaaagccatcagccccatcctcccaggggctctcatgggcagcctggccctgactccccaggcggctgctcttcacactgctgtccatgggcaacgagctcccacacctctgttggggtttgtcctgagcggaacctgggtcccccgactgccctccccgctcactccctgcacattctctaggagttcactgagaaaggtgcctggaggcctcctcagtcttagggtcccccgggggacgaggatgcagagtagcttcccacggggctgtgaaggttttgcccgctgccgacattgtccacctgcagccacctgagaggcagtgccagtcagatcaccagctctttcgtgggactgggacctgctctgccaagagttggcttcatgtcctgtgttcagaaatttcatgatgccatgccggccttccttcactcattcaacctggagcctcacgtccacattttaggatgtttcctcataaatcacttgcttggcgatgctctccattctgttttctctttctggagctcttattaatgttttcttccctatttttcatttcattttctctactttatgaaaaaattatcttttttttttttgagacggagtctctctctgtcacccaggctggagtacagtggcacaatctcggctcatggcacaatctccacctcctgggttcaagtgattctcctgactcagcctcctgaagagctgggattacaggtgcccaccaccatgcccagctaatatttgtgtttttagtagagacagcgtttcaccatgttggccaggctggtctcggactcctgacctcagatggtccacctgccttggtctcccaaagtgctgagattacacatgtgagccaccacgccccgcctgagaaatttatcttttatggaagttttcatttgtgctttttttttttcatttccaagagctctttcttaatttctcactgttccttttttattacatcctgttcttaggtcatggatgtgctgttttctcttctctctccaagggtatcagcaataaggttttttcttttttatattttttgttcctcaggttgctactctttcccccaagctcccttctttggtgcatggggatgtgggatctgtctttcgtgtggggtctttttcttcttcaaagtccagtgacccttggggtccacgtgtcttcatgagaggctcaaaagtgctgaggtggagcagtgtgggtgtagggggatgaggggctgctccagggtggacctcagagggggaagcagcaaggtctgaatatgtggtcagggttcttaagaggccagcgcaattccacagagcccccacctcccacccgggagacacatcaggctgttggcactcggggagggagcagagtaaagggctcaggccacctttcaggatgtggctgtgacctgatctcctggccctcctcagtgccttgctctctcacaggctgtgcctacccctggccccagcccagaacctcccagccctgactcctgagagcagcacctggacccctgtcttctgcctgcatctgtaggaaaagcagtctcctaggggtgggtctgagctcccagtccaccccatgctccaccttcagagctgcctggccttctggatggagtccctctggggtcctggggattccccaccctgtgtgcctgggctctgcctctccctggtctgcccagttggtactgcccagctgtctgtcttccagctgagccagagaggagatgcccacagataagcagggtcagccgtgtcctctgtggtcctcccgtgagtctagggaggggatgccccagaggagcaaggtcagcagtgtcccctctgtggtccaagatccagggagaagcgtgtgctctgcacgctgtgctgaaccagaagtcacccccttacatttgactctgtcttcaatgtatttttagaaggaaactgtaaccactgctgcttcgaatgtgctgtcaccatcatagccacctcccctacaaagacacaagcaggagccagaggctgggaagcctggcaacctcgagaaatggcacctgggatgtcacttgcacaagaaaaagaagacagagtgtgcccacctggcccaagagctgaagcccggaagtggggttgggtgactgggccaggagcctctgccctcggtcctcccacctcgggaagaatccggggcacagtgttatggggcagttgtaggagtagccgacaaacaaaatcaggagacttctcgtcacattcagacttccagcttgctataggttggatgttcatcccctccaaatctcctgttgaactgtggctaccagtgctggaagtgggcctggcgggaggtgtctgggtcctggggacagatccctcgtggcttggtgctgtcctgccatagtgagttctccaagatctgattgtttagaggcgtgtggcaccgccccgcactctttcctgttcctcttctcgccgggtaatgtgcctgctcctgcttccccttctgcctgagtggaagctccctgaggacccccggaagccgagcagctggcgatgccatgcttgtacagcctgcagaaccgtgagccaattaaacttatttctttatattacccagcctcaggtatctctttatagcaatgcaaaaaaaaaaaaaaaaagaaacaacaacaaaaaaaaccccacagcctaacacacagctcctcttaaaaaccagctctgggccaggcacagcggctcacgcctataatcccagcactttgggaggccaaggcaggtggatcacctgaggtcaagagttcaagactagcctggccaacacggtaaaaccctgtctccactaaaaatacaaaaaattagctgggcatggtggtgcatgcctgtaatcccagctactcgggaggctgagtcaggagaatcacttgaacccaggaggcggtggttgcagtgagctgagatcgcaccactgcacttagcctgtgcgacagagtgagactccgtctcaaaaaaagaaaaaacagctctggagccgagttcccacaaagcagcattgtctgtctgcttagagctggggcttcttgacaagccacttcatttttctgagtgtcaatgtatttatctgtaaaataaaaatttacttttaatttttaaaaaatggcctggggtgacaactgccccaccccctggggtaggatctgtgcccctcaaatctgcccgctccccagcattagcaccgttcctactagtgagtctatgacccctgggccgagggagttagggtgactgtggggcagctctaggccccttctcccctccactgtgcaggggcagcctcggagcccttcactcctcaggcctgggctggtgcccctccgtgcctgctgtgggagctggggacgcatgccaccctcacggggtaggcatgccagccggggagccagaaagaacatgaggcaaagatgggttgagtgcagggtggacccagggtggcagggaggagctgcttgccatttgagccgggtggcctctccgagagcagaggaggctgaggcccagccacgtggggtctggaggaagagtctccaggcaggggcagcagatgagagggcaccaaggcaggagtgtcctcaggggacagcagggggacccgagtggcacctcaagggggaggaacagggaggtgggcggttgggcagatccccaggcctctccacattccggaagggatcccccctggccttgtgtgcaccaggtgaggggccagggcagaggagggccaggcagaggctcctcctgtaacacaagcaaggtggccgcggcgggggccgtgtggctgcaggttaggtgtcgttggattctgcataggtgttgaaagtcaaggcattgagatttcctggccccagctgtgagagaacgacgtgggggtcatggagagctccagggcctttgcctgagcactggtggtggggaccgatgccactggggcgggtggagacagatctgcatccctggcatcagaactgcagtcctttgcacgcagccccagggggacgggaacctgcggtccgggagccatgggggctgcagctcagggagaagcccccacgtggtgaggttgcacatggccaggccaggactgggcgctgagccccaggaggaacccgagggagactagaagtggggccagcagagagaggaaaccaggggatgttggggagcccggcagcagtaggaggggggactgtggccgagctgcccctccccaccccagaggacagcttaagggacttaatctccaggaagtcatgggtgaccttgaccacgacagcatcagcttgtggcagaatggcagtgattgcaggggcagttcctctggcgtttgcagaaaacaggaggcaagcttgccggggatagggggttacgggaggggggtttagagtggacaaaattgcaggatacttgggggctactagggatggctctgaagagaggggaaagctgaagttcccaggagaggactcagcagaagggaagggagcccaggggggccgggggaggagccgtgtggaaggaaggagacaagagatgggtggaatgggaagaggaggtgggaggcaggggaggtggagaaaaggagggggaggtgggagggagcccttgggaaaggaggaagagttaggtgttgggggaggtgggagtgagggatacacgggaggcaggagggactgcctgtaaggacttggactcagccaggcgcacaaacagcaaccaagaatgatgtttgcacatctcaggcccaacttttacaaccactttggaacaaaaccaaagacagtaaacacggtgaagtcatccagtgcatgtgaaagaaaaaaaaatattgtgttcttcatccaaacagtgaatgttcttagcatttctgagaaacacaggtcacgtggatactaatcagggagtgcttcctggaagaggtgggagtacgggcagaaatcagccaggtagaggggaggtggctttccagacaagaccatgggctgagcaaaggccccagatggaggaggaggaggagcggacaggccagtgtggggagggtctgcgtctgctgggagcagagagaagccccatcacaccggctccttccttgggaggccttctcaccttcctagagggagcagcgcccccatcctgctccccccacctccctgcagcctgcacctgcctatcaagaagccttaccccatctcaagcacacacttgggtatacgttggtctctgccaccagctgcagctgatctctgccagctccgcaagggagagccctgttgtgttcagttcattattgtgtttccagacccaagacaatgcataaatgtatgaatgaataatagaaatgaatggatggatggacggacggatggatggatgggtcgatggatagatgggcagatggatggatggatggatggacagatgggcagatggatggatgaatggatagatgggcagatggatggatggatggatggatggatggatggatggatgggtagatggatggatggatggatggatggatggatgggcggatggatggatggatggatgtgcagatggatggatggatggatgggcagatggatgggtgaatgaacagataggtgggtaggtagatagatggatatgtgcatgaatagaaggataagcaaattcatgggcagatgagtagatgcgtgggtggatgcatggatagatgcgtgtgtagctgaatatcagttcaactctattttcttaggactgggttgttgccttttacacccccaaaacctttatccaaaggcctttctcacattacttttctctttctctttgttctcaagaagttcttgcctataacctttatttctggacataattacaaataaccttacattgttatttaaattcttcatgtttacacatttagcttataaataattcaagaggctaatgctgactttgaactagactcactaccagagtgataaatcaaccatgtttgaacccctgtggacttggcaatgttctaatcattaagatgatgacaccgggcatggtggctcacgcctgtaatcccagcactttgggaggcagaggagttcaagaccagcctgggcaacatagtgagaccctgtctgtacaaaaataaaaatatcaggtaggcatgatggtgagcgcctgtaattccagctacacaggaggttgaggcaggagaatcacttgaacccaggaggcagaggttgcagagagccgacatcgcgccattgcactccagcctgggtgacaaaagtgaacctccgtctcaaataaataaataaatcagctgggcatggtggtacatgtctgtagtctcagctactcagaagactaaggcaggaggatcacttgagcccaggaggtcgatgctgcaatgagctgtgaccgcacccttgcactccagcttgggttacagaacgagatcctgtctcaaaaaaaaaaaaaaaaaaaaaagataaaaaagtgttctgctcgagctcttcttggggactgggcctgccctgggatgcattctgcagagatgtccctgcctggtcttcagacataaggggcctcactcgaaccttttgaagctccccattgccccttgcccagcctctccttggcccacccatacctgtgcccccactctcccaccctaaccctcccagccttacctcactctacgccacctacacctctgcccctccagccactctggtctccttctagctccccagaggtgccatcttcccttctgccacgggacctttgccatgcagtttcctgtctttgcctcgttaacctccatgcattcttcaatttggggctcgctgtcacttccttggggcccctatagggtcaggcctcatgcaccctctccttgtcttctctgtgcttgcttggctgctggtcattactcagccaggtgagtatctggtttacctctccttccccctctcaactggatgctccatgagggcaaccccagcctggttttccctcatcatgtacctcccagagtgagggggtatctacagagccccagaaaaggggctcctgggaaggcagggggtgcctggctggactctactgccatttgatgccctgaggggagagtgcatcaagctgccccatgcacctgccggtccctacctgcctggggtcagggtcaagtcagcttcttaccctaatttggcatccaggagagacagcccactggcttgggcgcagaagtaaccagcactccagagagctccatcttgcggaacggcatctggggaagcatctggttttgccatctgatgagatctggtaatttaaaagtgtgtggcacaccaaccttgctcccgttctcaccgtgtgatgtgtctgctcccacttcttttgtcactatgactggaaacttcctgaggcctcccaagaagcagatgccactatgcttcctgtaaagcctgcagaaccttgagtcaattaaacttctttccttatcaatgctgcagtcttggccaggcgcagcagctcgcgcctctaaagttgatgaagacctagcctgccatgtgctcataagagccagcctctcaccacaggaggccatcaaagtcagggagactcctgggagtcctgctgtggggagacaggatcctcacaggctttcctggaaacgctggagcatgctgggccctccccatccccatggccacacaaggccttacatgtgctggtgtgctgagttccaggaccccagtgagaggcccagcagtaaaaggcaataacataggtggggaaggaagggccagggaggcagcagttgcctctactcagtggggcatcagccccaactgccagtccccagctgagcaacccagaaagtcacttttcttctctgagccccatctataaaaagagagggagttggcaattaagcaagaagatacaacaaaggcatccatattgaaaaggaagaagtaggctgggtgcagtgctcacgcctgtaatcccagcactttgggagaccgaggcgggtggatcacctgaggtcgggagttcgagaccagcctgaccaacatggagaaaccttgtctctactaaaaatacaaaattagctgggcatggtggtgcatgcctgtactcccagctactcaggaggctgaggcaggagaatcatttgaacctgggaggcagaggttgcagtgagccaagatcatgccattgcactccagcctggaacaagacaccaagagcaaaactccatttcaaaaagaaagaaaagaaaagaaaatgaagaagtaaagtcatctctatttgcagatgacatgaccttgtacatagaaaatcctaagccactgaaaaaatattagaactagcactttgggaggctgaggtgggaggattgcttgagcccaggagttcaaaactatcctgggcaatgtagcaagaccccagctctacaaaaaaattaaaaattagccaggcatggtggcacatgcctatagtcccagctacttgggaggctgagacaggagaatcacttgagcctaggagcttaaggttgcagtgagctatgatcacaccactgcactccagcctgggtaacagaccctgtcccaaaataaacaaataaataataactattagagctaataaatgagtacaacagggctgcagggtataagatcaatgtatgaaaatcaattgtgtttctatacagcagtaatcaacaaaccaaaagtgagatgaagagaacaattccataatactttggagtcaacttaacaagataagtgcaaaacacatattctgaagacgacaatacgttgttgaaagaaattttaaaagacctaaagaagtggaaagacatcctatgttcatgggttggaagccgaatatttttaagatgacattgctgcccaaattggtttttatttgcatttccctgatgccactggtatggcagattcaacacaatccctatcaaattcccaattaccttctttgcagaaattgacaaactatccctaaattcatatggaaaggcaaggaatccagaataatcaaagcaatcttgaaaaagaagcacaaaattagagaactcatactttccaatatcagaactcactacaaagctacagtaatcagagcagtgtggtgctagaataaggacagacatatagaccaatggaatagaacagagagaccagaaagaaactctcacatttatgggcaactggtttttgccaagggtaccaggcaccttcaatgggaaatttgttgaaacagtcttttcaacaaatggtgctgagaaaactgaatatcaacatgcataagaatgaagttggatactacctcacactatatacaaaacttaacacaaaactaatcgatagtccgggtgcagtggctcacgcctgtaatcccagcactttgggaggccgaggtgggcagatcatgaggtcaggagatcgagaccattctggctaacacggtgaaaccctgcctctactaaaaatacaaaaaaaagtagtcgggcatggtggcgggcgcctgtagtcccagctactcaggaggctgaggcaggagaatggtgtgaacccgggaggcggagcttgcagtgagcagagattgtgccactgcactccagcctgggcaatagagtgagactctgtctcaaaaaaaaaaaaaaaaaaaaaaagtaattgatatagcttgtatatttgcccctgtacaaatctcatgttgaattgtaatcctcagcattggaggtgggccctgatgggaggtgtctgggtcatgggggtggatctcttatcgcttcgtgctgtctttgcaatagcgagtgagttctcatgaaatctggtaatttaaaagtgtgtggcacaccaaccttgctcccattctcactgtgtgatgtgtctcctcccacttcttttgtcactatgattggaaacttcctgaggcctcccaagaagcagatgcctgtaaagcctacagaaccatgagtcaattaaacttctttccttataaatgatacagtcatggttaggtgcggtggctcgcgcttgtaatcccagcactttgggaggcaaaggcaggcggatcaggaggtgaggagttcaagaccagcctggcaaacatagtgagaccccatctctactaaagatacaaaaaattagccggacgtggtggcgcatgcctgtaatcccagctactcgggaggctgaggcacgagaatcgtttgaacctgggaggcggaggttgcagtgagctgagatcacgccattgcactccagcctgggtgacagggtgagactgtctcaaaaaaaaaaaaattatgcagtctcaggtatttcttttttctttttctttctttcttttttttttttttttgatacggagtctcgctctatcgcctaggctggagtgcagtggtgcaatctcggctcactgcaagctccacctcctgggttcatgccattctcctgcctcagcctcccgagcagctgggactacaggcacccgccaccacgcctggctaattttttgtatttttagtagagatggggtttcatcgtgttagccaggatggtctcgatctcctgacctcgtgatccacctgccttggcctcccaaagtgctaggattacaggcgtgagccactgtgccaggccagtctcaggtatttctttatagcaatgcaaaaacagcctaatacagacaattgttaccaaggagtgggggcattgttataaagatacctgaaaatttggaagcaactttggaactgggtaacagacagaggttggtagagttcggaggcctcagaagaagacaagaagatgaaggaagctttggaacctcttagaaacaggttaaatggttgtgaccaaaatgttgataatgataagaacaatgaagtccaggctgccaaagtctgagatggaaatgaggaacttgttgagaactggagcaaaggtcaccattgttatgccttagcaaataacttggctgtattctgttcatgtcccagggatccatggtagtttgaacttcatagtgatgatttagagtatctgctagaagaagtttctaagcagcaaagcattcaagaagtgaccggctgaggctgggcgcggtggctgacgtctgtaatcccagcactttgggaggccaaggtcaggagatcgagaccatcctggctaacatggcgaaaccccatctctactaaaagtacaaaaattagccgggcgtggtggcaggtgcctgtagtcccagctactcgggaggctgaggcaggagtatggcgtgaacctgggaggcggagcttgcagtgagccgagatggcgccactgcactccagcctgggtgacagagagagactccgtctcaaaagaaaaataaataaataaataaataataaaataaaaaataaaatagatgctgcatgcctgtatcaaagtatctcatgtaccccatgaatatatacaactactatgtatgcgtaaaaaaatttttttaatgaaatgagaccaggcagctcatgcttgtaatcccagcactgggggaggtgagggtgggaggatcccttgagcccaggaaaacatagtgagaccccacctctctctcaataaaaaaaaaaaaaaaaaaaaaaaagctgggtgtggtggtgcatgcttgtacagtcccagctactcagaaggctgaggtggaagaattgcttgagtctgggaagttgaggttgcagtgagctgtggtcacgccactgcactctgcactccagcctgggcaacagactgagactcaggctcaaaagaggggaggggaggggaggggaaaggaggggaggggaggactccacctctcctggagctgcacctgggcgtgttggccccactgcctgcctctctccactgctcccagatcctctgcagccccataataggtgctgctctggggccctgactccagctcagccctgtgtgctcttcccgtgagaagacctaccatcatcagtctcagcaccctccttcgtgccccaaatgcagattcccaggagagaactagttggcccagcctagggactggttcccctggccaggtgaccatcccatccaatcactggtgacaaaggagatggccgggcagcacagccatggccgcgggagccccatgtctgatccagcaggggcatggggtggatgctgatttcaaacacaaggactatggcagcttcccaaagggtatgcatgactcctcacaaaatggcacacgaggacattgttgagggcatggattatagtgaataccgacatcctctccatggcagaggcagaaaggtgctgcccagatccccatccaaggaagggggtggagtaagctggcagcctccagatgaccatctcaagccaggtcatgttcttctccagtgacccgagtcactgctgagtaaggccgtgactgcctgcacttctgcaggcagcaagatgggtttgtggacaggaccgcactccacctggtcagtgaccaggactctccctggttcaaggggcacagccagcctggccggcccagctgttcatgctctccctgcaataacctgggagaatgagagggtgcagagaccgtggccagccctgtgccacaacccaagctgattcgggttcttaaaatgtgtggcgagggcgaggataatggaattggaggattgttaactaagtcgcattgacttagagatggataatgacaagctgagggcaattaacaaacaactgaagactaagtgtgagagccagcaagcgtgttggcttccaagaagccctcagggcaggcaggcagcaggcagcaggcaggggtgcagaacaagctcaagttcaagtccagatttcacagccacagtggctgaacacagagatggctcagcagccagcggagtcacagcttaggctgtcaggagccctggttgggagccctgggacaccctgctgggggtgcagactgaatgtgcagactgtgctgaggagtttgtagcatttgacccctcagacgcccccttccccatcaagagcccactgttccccagaattctgtagtgtagaattctctccctgacaagataacaagctcctcctctctgagagctgtcctgaatcctctctgggccaccagacaccaaaccagaccatagcccacctggtgacacaccgggctgacactggaggaaagaggccacacccccaggggggctgcaaggctcagtcagtgcatgctgccaagactgggggacacttgtggcactggattccaagggtgctcagggtccttttgggcatcatggcaccccctggccggatcatttcttgcatggacaagcgcggccacctcagcctgagaaggtccagtggccggggcttagggaaggagtgtgagcctccaggacctgcagtggccacagctgaggtgggagaatgcaggagggagggaacgcatgccaggtgggccccagctcagccacagcaatgggggctcttctgcccacctccctgctctatcttccctcctgaaaggggctatagaccccaaaggagcagcctctgcccaggcacgggacaaaggccctgggcacaaggggtggacggtacagaaatgtaccactcagatctcccttcagaaaaggactaggcatgggggggctcatgtctgtaatcccagtgatttgggagactgaggaaggaggatagcttgagcccagggattcaagaccagccgaggcaacagagggagacctcttctctacaaaaacttggaaaaaaaaaaccaaacaattaaccgggcgtggtagcgcatgcctgtagtcccagctactcaggaggctgaggcaggagaattgcttgagcctgggaagtcaagggtgcagtgagccatcatcacaccactgcactcaagcccgggtgacacagcaagcctctgtttaaattttaaaagaaaaagaaaaaaagaaaagtggctcacacctgtaatcccagtactttgggaggccaaggcaggtggatcacggggtcaggagtttgagaccagcctgaccaacatggtgaaaccccatctctactaaaaatacaaaaattacccgggcgtggtggcatgtgcctgtaatcccagctactcaggaggctgaggcagcagaatcgcttgaacccaggaggtggaggttgcagtgagccgagatcgagccactggactacagcctgggcaatacagcgagactccgtctcaaaaacaaaaacaaaaaaaagggtaaaagaaagaggccaggcgcgatggctcaagcctgtaatcctggcactttgggaagccaaggcaggtggatcacttgaggccaggagttcgagaccagcctggccaacatgatgaaaccccatatctactaaagacacaaaaattagcccggtatcgtgatgcatacctgtagtcccagctactcgggaggctgaggcaggagaatggcgggaacccgggaggcggagcttgcagtgagccgagatcatgccactgcactccagcctgggagagagagcgagactctgtgtcagaaaaaagaaagaaagagacttgctgcccagctctttctccaggggttacctgcctattccccagtttcctgcctgcagctgctagagccttgagggtttgcctctgattttgctgaggtggcgcccgctggggtgtccgcagccagtggctgagtcagacggtagtaccaggaccagcccctctgccccgtcagggctcctgtaccagccactctttcctcccaactcgccaaactccccctcggctcagcaggtgctgtgtcaggtcagcatctcagccaacagctccagcctaattcacttcccccaggttttctctcatgggggaaactcacattaacttctgcaccctcagttccagctccttggcgtctccttcccagagaaaccagcccacagccctctcacttggcctttctttttaaagtttttaatttttttgagacagggtctcattctgtcacccaggctggagtacagtggtgcaatctcggctcactgcaacctccacctcccgggctcaagtgatctgcccacctcagtcctgagctgggactacaggtgagtgccaccacgcctggctaatttttgtgtgtgttatagagatgaggttttgccatgttgcccaggctcatcttgaactcctgggcttaagtgatctgcccacctcagcttcccaaagtgctgggattacaggcatgagccaccatgcctggcgcagcctttatttttatttatttatgtattaatgtatttattttagagagaggctcttgctctgtcaccaaggctagagtacagtggcaagatcacagctcactgtaaccttgaattcctgggttcaagtgatccttccacctcagcctgctgaatagctgggactacaggcacatgccaccatgcccagctaattttatttttagtagagacagggtctcactatgttgcccaggctggtctcaaactcctggcctcaagtgatcctcctgccttggcctcccaaagcactgagattataggcgtaagccaccgcacctgacctcacttggcctttgttgatgacaggcaggaaagtcagacagggttcatttatttactcagcaaatatctgggtgggatgtgtaacactgtgcctaagactatgggttctccagcctgggtttgtatcctggctccgctgggacagtgggcatgttctttaactgccctggtcctcagttccctggctataaaatggggacactcattaaacctgttccagagtgttgctttgaacaccacacacataaactgctcagcacaacgcccagcatgcactcaactattaggaattttgtctgctgttattttcagtttctttctttcttttttttttttttttgagacggagtcttgctctttcgcccagcctggagcacagtggtgcaatctcggctcactgcaacctccacctcccaggttcaagcaattctcctgcctcagcctcctgagtagctgggacaacaggcatgcgccaccatgcccagctaactttttttttttgtatttttagtagagatggggtttcaccatgttgctcaggctggtctcaaactcctgacctcaaatgatctgcccgccttggcctcccaaagtgctggcattacaggcatgagccacgtgcccagccgaaactgtacacttcaaatgggtgaatattatagaatataataaataaacaaccttaataaagctgttagacacataaatgaataaggcacgagttccggttccacccagcacagaagggccagactctgagattccgcggtgcgtggggaaggccatttgtaaacactctctggcccaaatgcagcaaggctcccagggcaaatggggtttccatgttccagtgcttgggaaagactaacacgtattcgcgtccgtccgcgactgcctgtctaagcgagatgagccaccagaaatgtctcaggcgccatcctccccatccagctcctggtacctgctggaaaagcctggggcagccctgcactggcgcaccttcttctcacccggcccatgccctgccccttccgccgcacacacccccgcgcagccagttatgggcttcactgccagggtcgacctcggtgggcccgtgtggctgcctgccggcttctgatgcacatcatttcttgccacacagagcctcaatctagcctgtgctctcagggtggtgaaggcagcgacataaggaaaggattacggtgttaacaagtcggaactgaacacgaataaaaataaccacgtgccctggcagaatgctttccatctgacgacggggatgtcttggtgcatggacgagggtccacgggtgcgctgcctggtgaggacaggctttgggaagcctggcacacctctcccgacatctgcaccgctcctttatctacatgacctcattcctgggccgtgaccctgcccagcaggcgctcgtgccgcatcaggcaggcgtaaagacaagtgcccagcctggctgggatgagcccgtaggcctcttcagtaaccatggcaacgctctaggacgcacccggcatcctttgcatggagtcaagagaggatacaatgtaataggagagacccttgaagaagaagctgcttccttccctcatgcccagtgccaacctcaggtcagtctccatctggacatctgcagagcatgagctccaagtgcagaaatcgtgtctgggctttgtcccttcccgccgttcactatcccctccccccgccccaacctgaaggctgagcacagaggaccaccagggaggaggcccggacgttgagcacccagggttagcagccggcagactgacacaggaatcccagccctgtcatgtgctggccgtgtgacgctggctgtcacctagcccaggctgagagcctggtttcctcctctcacaaggtgcagcaccacatccggagggctgcggaggggttcggggaggaaatgcgtggccggcttgggcaccaggtctggcactgagtggtgggactgggctggtgacactcagtaagacagtggtggattgacttagaaggggcctttcatcgtttactttctatccaagtagaacacagggctggggaatgctgcccccaccccagccattcctgagcccctaaagcccaggagcccctcacagccaccgggagagaaaagctgccagcctcccgctgacagcccgtcttctgttccaccaggatctctcagcatttgatcctgcattctgaggtggcagcaccagggctggccctatcagaatctgacatttcgaaagctggtgtctgggtctgcccaggttctcatcagctccagccagctgtccctccagctgcacctggaagcggggccgaggctgcccgctaggtgctggagtttaacacactcctcttttattttccaaggaacttcccatcacacagggctcctcacgccaggaaactcggctgttggggtgggaaggggagaaagggaggtggaagggggacaggaggcaggagggggagatggatgggaagagggaagagggtctgaggatgcctgaacttcaacccactggtgctcatccagcctcccgggaaaacagccctgcagagccccatgcaggaggaaatggattttaactggattcacagagagcaggtcagacctccatgagaattcctgatggtacaggatcaactcagccctccctcctcaccttactgtccagccacctgtgggtccctgtgccccgaacaccctccctgggcctcactgtcccattccctgcccggaagtcctcctagcaaagctggccctgagcctccccacacggcacacctgtgccctcctcagctcccttcaggctggtgctgttgcacctgtgcggttggagggtcttcctcgggggagggggcctgaggcctgcagggcctccccaatcccctctcctgcgccagatcctgaatgaggggacggggacggttgagtcctgtctcaccagcacgtggccacacttcagaccactgacttatctgtggaccacccatcgttaacgccctctgaattaactcagctgttttgtgtggcgcctactgagcaatgacacctgtgagatcaatggctgtgccagtcattcttgctcaggggaacattagagtcacaggatggttttctgtggtggggcacccttacctgctgcaggatgctggcctgtgccaccccagctagactggtgatgcaacgtggagcagggtccttactccatgtctccccacctgtcactggggaccacggcatgctcctacatacacagagcaagcacgtaatgagtggcttgtggctgcagcagaaacctctccagctgtccctatggccctcccagtgccctcagcacacccagttcctacacgttcctccagaatagcccctggttactctcaaagcccttcacaggcatgatcttccggggtcctcaagcacaccagtgagatggacaggcaaatgaagaaactgaggcaggcagtccaagtggcccagggtttcccagaagccccagctcattcctccaaatccttgggctcgctggtctaaagcctggtgattaccaggcaggtgggctgttcagacctgtgcacagtaaagagctgcttatagtggaggtgctggatacatgtgccccagcctggaaaacaagccatgccagtgaacgtccaggtcgacttaggcctggcacaactgtcgccttctcagacctcacccaagtgccctccactttgggcaggataccaaggaatgaatggcagggcctgcattcctggacctgggcactacgtatatttttagcctctgccttcctgggcatttgcagggtggctaatgttctcagggagccaccagctgcacacccacgggctgggcaggcactcggaggtctctgggaactgcaccctccctgccttcagtccgggggctcagaggccagctccttttcaaggcagaatcagctcctgctagtgaagcatgcaccccacccccaacacagccagaagcctgtggctcagaaactaggaggcatgaagtacaggatttgtgaccttggatttccttacttggaaaatggggtggggtggggggacagaaggactttgactccacatgggatcaccaggccagctcactcaggagacctggttggcacctcctcctgacaggtgcaccctgtatatccaagtggggaaggatgtgctgtgttgagaagctgagagtctgggtcgcgcttcccagggccagatgccccagtcgctggagacctctcctccctgagctgggctgactccatggctttgctgtctctgttctcttcctgcatatgatgttccaggagccaagaagcaattctagaatgtacaggtcaatcttggcagatgaaactgaattttccctcttctcttctgcttcctgtgtccccttccttaaactcatcactgttctcttactggccattgccgggctctggtgggagcaggttggcttcacctttgtgaagagacaagagacagtgtgatgcggccccaagcctgtggaggatgccaccaggccagactgcaacttctctgcgtgactcccccgtgctgggcctctgtttccccttctgtcaaatggggagtcacagcgtctaccctgcagggcaggtaagatcttcttattatagtcagaaacacattctaggtccttaccaagtccacacttacacaaacaggtgaattaaatatttcacaaaataatacttactttcaccatgcgagatactattattttctttttttcctttagaaatagggtcttgctgccacccctgcgtgcagtagtccaatcacagctcattgcagcctccaactcctgggctcaagtgatcctcccgcctctgcctccacctccccaggagctggaactacaagtatgtgcccccacactcgcccaattttttttaaagttttttttttttttgtagagatggggtctccatatgtcgcccaggctgatctcaaactcctggcctccagtgatcttcccgcttcggcctcccagagtgctgagattacaggcatgagccacccaccacgccatctgatatcttctagcttattctatttcatttttattattatttttcttgagacggggtctagctctgtcgcccaggctggaatgcagtggtgagatctctgctgactgcaatcttcacgtctcaggctcaagcgattctcctgcctcagactcccgagtagctggggattacacgtgtctgtcaccacgcccggctagtttttttgtatttttagagtagagacagggtttcaccattttgcccaggctggtcttgaactcctcacctcaagtgatccgcccgcctccgcctcccaaagtgttgggattacaggcgtgagccaccgcgcccagcctattgcatttttatagtcaccacccactactttttttttccaggacccaatattggtccgtgatctgatgatgttcacggtcaagacggaagcaaaaaaagcacacaccgcgcgccctcggtcactaatcacgcggagtatacgcgaggagggcccgcagctaagcgacggcgggcggccgagcttcctccacggccggggaggtgggcaaggcctccgggccgcagccccgggtacgagcggaggctccgaggcccccggtagccagtcagaatttattttaagggaaatggaaagctgcggcaggctttgggaggaggggcaggattaaaagagaaagtgtgctcagcatgttatatttagaggctgccacgccggaagcgccgccttcccgggagctgccgccgcgcccgccccccgccggcacctgggcactggggcgggagtcccggggctgcccgggaacacccggcgcccagggcctccgccactccccggtcccccatgagggtgagggctataggcgcatctggcccaagataggggagtcgtccggaccccacttctgtaggaggggaaactgaggccaagggggcaaagcccccgtgttcgcggcgcccagggtccggggcggcgccggcacgcgcgcgggcggggcctggcgctcctccccggtcccgcccactgagcgtgcaaaccgcagccgcccgcccacgcgcacgcgcgctcctcccgggccgcttcccacccctccccccgcccgctcagtctcgtgctcccagctccgcgaggggcccgccgggagccggccgagggtggggcggatcgccggggagacccgcccccggccagcggcgccttgctgcgcaggaacgacgcgagggcccgccccccagctggcggcccggccatatttaaaggacggcgggcgcggcgagccaatgggcggcgagcgtgaaggggcggtgcgtggcggtgcgtggcggcgcgaggccccggatgtggctgcggcggcccctcctcccccgcgctcctctcagagccccagtcgcgcgccccttcttggttcgctcggtgcccgcgcaggcccctcgggcggtggcgaggaggcgcccaggcggaggcggcggcgggcggaggagcgcaggagcgggcggccaggccaccgcgcggcggcggagcgggccgcggcccggcgctccttccccaccgcggcccgacgcaccccggccgccgccatgagcggctcctcaggcaccccgtatctgggcagcaagatcagcctcatctccaaggcgcagatccgctacgagggcattctctacaccatcgacaccgacaactccaccgtggcgctcgccaaaggtagcggccgccgcccgcccgagcccgctgacccccgtccgccaacagccccggcctgcggtgccctccccgccccggggcgccccggagcctggcgcccagaccccgcccagaacccacccagggcacacccggcccgagatcccctgcccgcgccttcaccccggacgcccccgaggcgcccccttcccgcgcgccaccctcccccagcgtagccggccgcacaatggtctccctgggctcccagggcggcgggattgtgcgcgggcgcccggcggtgtttggtgaggggcgggcccggcccccgcggtgccgccccctcggccgcccagcccacctctgcaggtgccagctccgaggagcagggcggctcccgtcagcgggcctcctccccgccagcctggggggatccctgcgggggagcctcgaggtcgggtggcggggccagtgtcccggcgtctcccgaaggctgggggtggggtcacaacacgcgaatcctgcaagcctttctggaacttattagacagctggggccttgatcctgaacaaataccgcgtcctaatgcggcctcctgccaaggcagaagcatccgttggcagccagatgccccggtttaaacggttctcctgctctatcctgaccttcccactgtggggcttaccttttggtgacagccgcctgtgggtgctcgtaaccggctgtggccgctggaggacttacaggaggggggctctttagagtcagaatctctgaggttgttgaggcagcgggtggtccagagtttctttgtcttcatcacccagagaagacggggagtgcacttcccctgcctctcagagaaaagtgcccgtggagccacgtctgcctaagcccgtgtgtgtgctggatctggcgctaggctcccaggggttcttgaagtgtctagacgcgtctgaaacgctgcttaggtcacagggaacttcatgtgtagaagaacgcactcattccaaacagggagtgtctccttttgaagcccgtctcctgcgtggcttcaggagcttgttgagtatgccagggctatgcactcacttgcagccatggaacctcactacacttattacaggagagcccagttagagaagctgaggcccagagtaggcccaggagttagcaggagttgtgtcttaccagttagaggctgctgtcccacccacctctgcccctagaggcttgctagaaagagacttgggcgctcctggaagcctgctggttaggggttagtagactcaattccttatagatgcggaagccggggtcagaggtccataatcctgggaccctgtctccctttgttttctgttacagctgttccaaggtttgttatggatagaagggtaagggcaacactcgtctagattcctttgtgagaaaactgcctcctcaggcgcaatgtgcggtgaggctttgggcataaagcagccggctggctgttggatctacagagtcaaacgtgaacagggaggccttacgaagcaagccttgttttgctgagagctctgtacgttggtgccttcgcacatcagactgtcagtctgtgaaattgttccttgtcatctttgtgatctagagctgtctgttgtctggagcttcaccaattggtgcattatcagcactgtccattgaaaatcggggcattaagtagttgttgaaatgtggacctggggtgctgtgttgtggctctgagcaagtgtcgccgtcttttggaaggcttgggagcagtggtgtcagggttgattgaactggctgaggacaacaataacgcttctctttctccactcataagtgaggtcctttggcactgaagaccgtcccacagataggcctgcgccccccagagaggagatttatgagtacatcattttccgaggaagtgacatcaaggatatcactgtgtgtgaacctccgaaagctcagcacacactcccgcaggatcccgccattgttcaggtaagtgtgccactgtccctctgtgcatgctgtaggagatgctggtttccatttggagcttggtggcatgtttggtcagaacgctcaatgtgaggaataacctttttttttttttctttgaggcagcgtctcgctgtgtcaccaggctggaggtcagtggcgtgatctcagctcattgcaactttggcttcccaggttcaagcaattctcctgcctcagcctcccgagtagctgggactacagggacgcaccaccatgcccagctaatttttgtaattttagtagagacggggtttcaccatgttggccaggatggtctcaatctcttgaccttgtgatgcacccgccttggcctcccaaagtgctaggattacaggcgtgagccaccacacccagcctgaggaataaccttttaatgaaaagtggcttaacttttgtccaggctgttgctgctctcacagaaggtgttgattcttgtagcacacacagtaggtggtgtgtgctgtgtcacgtggctcttaaggaaggcgacctggggagttgggtgtgcatgtgcgcgtgtgtagtgtagtgtggtatgagtggatgctcctggacctgtgatgtttcgggcatagcgtttgcccttagtttctggttggagaagtctgagccctgagcagctgctgtgagtggcgtgacctacctgcagggactgcagggcttgccctcgggttacgcccagtcgttacatgctgctgttatacaacaccagatttgcaagtctgatgccatgtgcctgcttattgggttatggcttattttgcccatgctcccccagggagcccagattaatattttcttcacttctaaatttaaatattcactagctcctctggggttcagactgcattaggttctgtgctgagcacccatcctggaaggtgggatcacacagggccggctttgggagcagtgggaagccatccgatggctttgagttaggagaaatttgggttagaattacatggacaagacacctgtaatcccagcactttgggaggccgaggtgggcagatcacctgaggtcaggagttcaagaccagcttggccaacatagcaaaaccgcgtctctaccaaaaatacaaaaattagctgggtgtggtggtgggcatctgtaatctcagctactcgggaggctgaggctgggagaatcgcttgaacctgggaggcagaggttgcagtgagctgagatcacgccattgcactccagcccaggcgacagagcaatactctttcaaaaaacaaaaaacaaaacaaaacaaaaaaaggaattacatggacaggtgaaactggaactgaaatgctgtggaaaaggcagctctcaccatactggaaacttgcaccccaagggctcctccagcatctcaagggtgcaggctgatgggacggtgcttgtttcccagctgaacaagcgccctgatgaaggcgtgcggggtgatgggatggccttcgccgttctcacccgatgtctcgttgttcagtcttccctgggttctgcctccgcctcgcccttccagccgcacgtgccttacagccctttccgagggatggcgccctacggcccgctggcggccagctccctgctcagccagcagtatgccgcctccctgggtctaggtgagtgacctgtttctgtctggtaaactacccttgcgtgtaactgtcactgagtggagcgatggagcctgagggtggggatatgcattcctgtcatgctcagcttgtagactgttttgttgcacacttagtaaattacccagtgcaacttccgcttgtgagagcatttagtaactactcaactgaaagtaaaagaggcagcagcctgagtgttggaacagaagaatcaaatcaaaattcattcgaagagtcagggcggatctaggtggaagtcctgggccaggcatagtggctcactcctgtaatcccagcactttaggaggccaaggcgggtggatcacaaggtcaggagttcgagaccagcctggccaacatggggaaatcctgtctctactagaaatacaaaaattagctgggtgtggtgggacacacctgtaatcccagctacttggggggttgaggcatgagaattgcttaaacctgggaggcagaggttgcagtgaactgagattgcaccactgcactctagcctgagcggcacagtgagactctgtctcaaaaaataaataggtggaagtcctggtatatctgcttcaaagaagaaatagctgatatatatgtagtattacagatgaagtctagctgtttgcacatttataagcctgtaaatatagacgtgaaatacaaacccacccatcatgtcccttattctactgtaagtgcctcgctcaaaaatggtttcaaccaagattgaaaaaccccagagtatgattctattctccatatgtagagaaagatcctgccttgtccttaacctggacctagctttgcagatgggctcagagtgtagaattggcaggtgatccacgacccttgctcagaatccagcatgaagtagtgagacagggaaccctaaacgaggtctgtaggccacttgctgctacaaatcatgcttgcttggttgctattcctagtgtgacaggcggccttcccagcccagctctctgggtttctaaaacgtgtttgtatgacagaatcctacaagaggttgcttggctctttccaagcttgctagacacaagacaagtgtatcctgacttatttgtgtgctttctttttgctctttctcctttatcttcctttagagaagttggtaagccctccagcctcagccgctgcttccagccctagctcttctccatctccacagcccgtttcagagcttgacttgtcctcagagccacagcagctcactgccaagggtaacagcagtttgggagaactgcatgctgtcttgcaaaccattctgagagcgaggggtaaagcagcagacagaatgacagtagctgtagcagatcatttgccaagcccatgcagccgctgagctgcttgttttgcttcagcatgtagtcctgattgatgaactctcagtgttaaagaagggattacgaagaatcagcggagtagtttgttctctctccctgggtccaggttctctgttgacctgtaccatgactaccacatacgggaaacttcactgttcacagaaagtcatttccctggggtttttgctgggtcctaaatgtgttccagagtgctgcaggggggactccccaaagcacctgacatgcctgttttgctctttgatccgtgtggttcatagatcactcattgaggggattcaaaattaggggcttgggtgacagtcgccaactgtttggccaggtggacagtatcagcctgatggccagctggccagtgtacaccacctgtctctgtgctgtggtggtggcggcacctgtggggtttctagatcttttctcacgttctactcatttcccctgaagttctaaaattcatattgacgatcttgctgtatgtttgtgttacacatagcaccctgacaagctgaaccatcgccattacccggccctggtccaggttgatgcctgggctttccttatggcacacagctgctgtcagtctgtcattctgcaggtgctgctttccaaatcctgcatgcactctgtgtatctgagttacagagtagtctttttttttcccccacttaaaaatgacacagatacttctattgctcttaggatcagttacctaaacctgctcatagggcaagactttgtttgaactagttggttgtgtaaaaagcagacaagccccttatccatgcccctgcagtcacagtatgatcagcaggcaggcagtgctgtgtttgtctcccggacatgctgagtgagacaatcagtgagaaagtggcccgggtgcattcccgccagaggacactttccagacctctatgcagagtcgttccaacctgccctttgagagcttctcttgatctggttacaaggaatttttctacagtcaattttttttttcatttctattccgtaaaagcagtaagatgagatgcccagtcttcatgtgtattgggctgttcgtctaataataattaccctgtggttagggtgccttttctgtttcagatctctgttcacttacacccagtcccacattgtcctgtttagagtccctacaggtcctggaaccttggaaagggaggagatggagagaggtgggtggtgcttcccattttcctcctgattcagagggcctggtttctgagggttcatcccctgtgcgtgggcctcggactgcagtttcataggcatagccccttgccaaaggctacctaggagccctttgtgtcttcatgatgagcctttgcccttgagagaagtgtaggctgctacgtctcggaagtcagctcctgcttcatcatttttagttttattgtgccttaagtggaaatgacagtgttgtagaatttaacttcagaatttgttcactgcattttctagaaaatcccaggctgggctggttcttctccagtgtggaccagaatgaaacaaattctcagatcctgaattcatcaggatcttggggctgctgagctcctttgggattggagcttgtgtggttttaagaaagctgtttccacacttctggggaggtgcctgtttgtaggcacggtgtttttcctgtccttgaggttccctaacttgggaagctcagggctttgggagtggggagtccaaagatgaactggccttggtgctgcccagtgactcttggccttcttttgctgcctgggctagcctcagagggaatggcccagtctgggggtgctttgcctggatttgatagaacatctaggcagttgccctcctttccttcctgacatgccagcagaagagaaatgcctggagatataaggcttgcttcttttctctctgtttttaaaccctcctcccctcctcaattcaggagctggttttccatccatcccagtcggcaagagccccatggtggagcaggctgtgcagactggttctgctgacaacctgaatgctaaaaagctgttacctggcaagggcaccacagggacgcagctcaacggtcgtcaggcccagccgagcagcaagacggccagcggtacttgaacacatcatttcctggagtttgcttgatgttctaaaagtggcacactacttcctgggctatttttttttttttaattaaaaaaatactactcccccatcctaagccccatgtgcttttgcagggcaggcctgtgcagcagcctcctgcggtgccgccctggccgcgtgccccatggtggtggggcctgcttccacagctgggttctggcttccggctgctataggagctttgccttactcttcccttttgcgccgtagatgtagtccagccggcagctgtgcaagctcaagggcaggtgaatgacgagaacagaagacctcagaggaggcgatcaggtaacacctgttgccacttgatttctggggaccacgagtgatcaggctgagctctgcttgccctcctgcctgcttctctggttgacggtttcaggggtgctggtgtgaagtcgctgcttgtgtgctctgttccttctgtggccttgggggtgtgcctggaaattccttgtgaggtgtttgagatcactgggttggtgacctacttcagccagggctgtcctttgtcctcacaggaaacaggcgaacaaggaatcgctccagagggcaaaaccgtccaactaacgttaaggaaaacacaatcaaatttgagggtgactttgatttcgagagtgcaaatgcccagttcaaccgagaggagcttgacaaagaatttaagaagaaactgaattttaaaggtttggctcattatatgaaaattattctctgcacaggagtacccctagagagtgttaggaggagatgcctggccgggtgtggtggttcacgcctgtaatctcagcactttgggaggctgaggtgggtggatcacctgaggtcaggagttcaacaccagcctggccaacacaatgaaaccccatctgtactaaaaatccaaaaattagccaggcgtggtggtgggcgcctgtaatcccagctactcgggagactgagacaggagaatcgtttgaacccaggaggtggaggttgcagtgggagtgagccaagattgcgccactgcactccagccgggcgatagagcaagactctgtctcaaggaaaaggaagagatgcctagaggaaccggggatgccaggcggatggtgaccggcagtgaggaattaatgaagtgaggtgctgggaggtgtgaaaatgggtgggataaggtgcagactgcacagcccagacggcagaacgagacctgtacttagaaggtagaagaagagatttctgctttgcacaaggcatagttgatgtcttagcttgagggtggcttccgagtgagcccggagggaccaccctgctaaaaggctgtgcgctctgcccctcctccatctccacgtgttctgcttctttttgtagatgacaaggctgagaagggggaagagaaggacctggctgtggtgacccagagtgccgaagcgcccgctgaggaagaccttctggggcccaactgctactatgacaaatccaagtcgttcttcgacaacatctcttctgaactcaagaccaggtgagaggctgaatgaatgaggggaggacagtcctccaatctagaaaggacagggctgagggctctcaacctgagggcagagctggactctgaggctcagggtagctgttctagggtcctgcttgcgtttctgcatgatgggtgccggagtcccagcaggttgcgtgtgggaagcctcttggggatcccgacccgaggagttggctgaggtcgagcctgtttcctcttggctttgctgccctgtccccacaaaggctgggctgcaccgccccccccggcagacccgtgtccacattcagcatacctcacggtgctctgcttgctggtcccgctggcctggcagcctgaggtccttgcttagcagcctgaggtatggctagaacgtgctcacactggctttccttcacttcattgtttgaggccagggaccatgtggtgtgttttatttttcacacctaacagctggtcagaagtcccgcgaagcaccctagggagtgggtggcatctacagtgtgggcctggcttggaaacttgggcccatttgtcctgcagattgagcgccagacatgccgcggggcgttgagggggcctcagaaggcaggctggagagcgccacctcttcaggttcatgttctgccaggggaaaaatagaacagcatgtcgtgaaggccaggcagtgagggcgatgggatggggctgtaactcgatgggaagtggatgatcagttctcacaggcagagcaggctgcgcagatgagtgcgggaagtgcttccagacaggccgagtctgggggatgggttcctgtagggttttgtagggcatggcagtgactttggcttttgttccaagtgccgcgggaagccatcagagggttttgtgctgaagcgtggtgcggtctgatgttttacggcgtccttggtgagagtggttggacggtgggcaagtgtggctgctgactggccagttaggggccagtgctgcagcacaggtggcttggaaccaggcagtggtggtgacagagggaaggagtagagtctaaatgtgtcttgaaggtggcgctaacagaattggccaacatgacaagagaagagtccagaatgactcctaagtcttttggcctgggcggctgatgggtggagttgctgtttctttgaacacggaagtctgtgggagcagcaggtttccggctgaagaggagctcagggtgggtgtgctgctggagctgttgtctgcgtcggtaggagtgctgggtgggagtgctgggtgcacagttggatgtgggagatagtctcccaccagcagcttgtttgggtggcatgagtgtccatgctgtatccctgtctttcaaactcccaaagcagaagcatcacattccagggaacttgttccatctatcctagcctcctccttgtctaggagggtccacttcatggtccggtctcaggtctcctgggcccctgggcctccccagggctcctctctgtgcccagcgagcaacagcggctgccttggtagccaactagtatcactgcttgcctgtggtgccagagatggtagagatggatcccgatccccggcccactgtggagacagtcctggttggaaacgtggcagggagcacctgcagtgccggagctgggctccagagctgacggggccgccccttccctgtagtggccctggtgagtctgtccctccttccctgggccgctctgaggacgaggcctggccagaagcctgggagtcagtgcctgctacaatcagcatttcctctgtggtttagctccaggcggacgacgtgggccgaagagaggaagctcaacacagagacctttggggtgtcagggaggtttcttcgtggccgcagttctcggggcggattccgaggaggcaggggcaatgggaccacccgtcgcaaccccacttcccacagggccgggactggcagggtgtgagggtgcagccaaaggtgagtggatgaaccttctggacgctttggtgggagggtgtagggtcaggcacacctggagagcttaggaaggtggggagcaggctcggtttcccaggaagaagagaggcccagaggtgtcaaagccaaaccgagggcctcgaccctatgagtcacccgggaggctcttggccaacttcaacctgcatctgtgggggtaggatccaggccccagcatcctccaagtgagattgcaggtatgggaggtgaggtggtgcgggagtcgcgtgggctgggggctcaccacccaggtgaagccagcaagtgagaccttgctccaaagccagtgtcttggcccaacccggccctaagtgaatcagaggcttcatttttaaccaggtcccagtggatttgtgggcaccttagggtttgggcggagcgtcccacatggggtgcctggtgccaaccccacccagcgcctcgggacagccaggtgggccctggaaagactagccctcctgccactagctgcgtccctgtccccagtgtattgtacaagtaggattctcagagtgggttgtgagaagaatgggggtagccagtctgactctgggggcaggagggaggctgagtggctcctgctcgccagcaggggcaacagtgctagcttatcccagcagatgcttgacttcctgtcatctcttgcaggctcctactgaagtggcgcataactgacgctgtgtgtgtcaggacgcgaggaaaacgctgcacttacagggagaggtggtcactttgtttacggagtttggaagagacccatactgctacttgtgttttggacttaactgaacttggacatggtctgagttagaaccacttgttttggggaagtattcatgggtaacctctttgaggtctctttatctgtgtttcctttttagttgcgcatagcctaattctaaggttttggtattttgcaaaaaggtttctatagtgaaagctgaatccttactttgtgacttttttttttttttttaatgacaagctttgacttttaaaagtggaaccaaatctgttggcagaggtggcagccaagtacatctctgtaacccagctggcccctggtgctgttggcctggcaccccactgccaagggtggggtctcaggagtcaggcagggccagcacagggtggcgtggggggcaggggtgggtgggtggagggcacggaaggggttttcccatggatcatgttgtataagtgaaccagaccaccctgatggcatccacagtgatgtcaaggttggggctggccaggggtgggtggactagaagcatttgggagtagtggccaggggccctggacgctagccacggagctgctgcacagagcctggtgtccacaagcttccaggttggggttggagcctgggatgagccccggcagcgccttggcccttctgtggtccctgccagcctctgacctgggccggtcagtcattgctggactctggccacacactggcgttctcatccacttggaaacaagccagtcttttctgcaaggtcagttgaccaagagcatatttcccctctgttgtacatcgttgttttgtgtttgtgttgtaacagtgggtggagggagggtggggtctacatttgttgcatgagtcgatgggtcagaactttagtatacgcatgcgtcctctgagtgacagggcattttgtcgaaaataagcaccttggtaactaaacccctctaatagctataaaggctttagttctgtattgattaagttactgtaaaagcttgggtttatttttgtaggacttaatggctaagaattagaacatagcaagggggctcctctgttggagtaatgtaaattgtaattataaataaacatgcaaacctttaaaattttcttttctgatgctctaagaatcctgttgactcttctgcccaagtcacctctgcatcatgtccaggtctggagcacacacttaggctggtggaatttggggagacttgggccccatcaggtgatggaacgaggtggctgacccaattggtcgggtgaagtgcggccagcagacccgggttctccctgtgggccacccttctgggatgaatggctctgctctcagaaactggatacaaagttcttttaaaaacccagctcacagataacacctgtatcataagcagtggcccctttgccaccttcctgctgcctccaagctccccagctcaggagcgttcaggttctcaggcaccgtagagcatgttacacagccatgagcaagctgcaccctggacccacgcagaaaaacaaagacatggctggttctaggctcagagcatcccattttagtctaatgggtttccaggtgaccttaaaagtggccctcagagaggacgaggagacacaccagctgcatgagttctcctttcattacctgcctgtggccatcaggctccacagcagaactgccagtggggggccctcccatttcttgggtgggggtaatgggtatccttgaccagcagaaaaataaatgttacgtgtgccagatactggtggccacagtcctcacccagctagagaacttggtgaaacaggtattgcctcccagagcatcgcaaggtagtcaggttatcgtgtgccagctgaccttgctgttaaaatgttcattgttttgacaactgtacattttacgctgagctcaaaatgtatctgggcccctttactcctttttagaagatacatgcccaaaaccaaggaccagaggacccaaaagccttaaactgtgggactagaagtcaaaacacaggaaagggcagagaatagccagaaccagtcttcaacatagggggcagacgtcaagatgtggtctatgaaagtcagacatgcaaagctgctttgaacaaagctgctgctctacagaatgaacccagggctacttgtgtttgtgtccttgacattatacattcattaggggactagaatgaaggtctaaaagcaaacggaagtcattctgtgtctacaacagagaaacaggtctgctgaaggccaggtttctctgcaggacccagggcagcagctctgacttcccaagggaggaacctgtgtctcacactggcttactgtcttagccacaaggaacagaaaggaaagctcaattacggtggctcagggttgaaaaagaagggtgagagatgagaggactgctgtgattgcacctaaagatacacattctcttaaaaaaaaaaacaggttaaaaatacggaagtttattgtaggacactcagtgtgaataaatggaatggaaaggcctacacatcgagactcatccatgattgatatgaatttaaaaattacaagcaaagacattttattcatcatgatgctttcttttgtttcttcttttcgttttcttctttttctttttcaatttcagcaacatacttctcaatttcttcaggatttaaaatctatagaaaaaaacttcatggttacctaagccacacaaggtgccaaggaaccagcgccctcttctggggagggcggccaggctttggcactgctgctcatacagcctctttggagaggaacctcaagaaaaacaagaggatgctggcctgacctagacaagtattaagcagcagtagcagcagcagcagatctgactggcagccgctcagcatgcccagagaacacgcgtggaccatctaatcagaggaagatgggaatcttctctttgacgtatggggagcctcagaaagacattttcctaatgttaaaaccacagaatggccctatgatgtttccttcggaactggtactgctcagccctgatcatgggagaaaactgacaggtaaagaaagcagacaaacttggtgattaccttgagggattgatctcgcctcatgacagcaagttcaatgtttttgccacctgactgaaccaccttgaagggacagaagacaggagcattaaccacctttccctattcaagacaaaagcagctctcaggagtaccttaaataggtgtgtacccaaacccagcaccgtcccaggaacagaggtcccagcccccaaaacctgtgtctttgtcctaaactcatggccatttgtgaagtctgtttgggatgcctgcacacccctccgcctcccagcactgggactcctctctcctgcacagtagcgctgctccaggccctcctcttgacacagtggttacaaccaggaatcctgatgcctacgctcccgcctggccttccagctagtccctctctggttttacctgctagcacttcaaggtcttgacaaagcccaaccatatctccagttctctaatcccctgactttagcaacagttcaagcctctggaaggcctagtgatggctcgagaacagattccacagctggacagctgggttcacatcctgcctctggttctcatgctgtgtgtccctgcacaaccctcagctgccccggctggataaagacactaatgatcacatcttgcatggctatttcaaggaacacagcagttaggatacaccatagaccagagcagtgcctggaacacagcagtcattaagcattactgctggatccttgccaccttccttcctgctcatctacctaccactcaccaccaaaacgtggtatcttcaccaccttgcctggattccaaatgcaaacttacttccaggagtgccttgatcaccagcttaatggtcagatcatctgtttcaatggcttcgtcagtatagttcttctccaggaactcgcgcactgacttggcaccccgacctatggcattggcctaaaacagacacgtatgttctcacgtggcatagggcatgacaacccagggccagccctggaacacagctgccctacatgggccgcccagccagtggcagtggcaggaggcaagctggagtgctggacagcagctgtggacacaggccctgcctcgtggcttccttttgcaaagagctctttagagttgatgctgattcttaccgagaatggggttatacgattgtatgttttactgcgctatcaagaggcaatgggagatttttttttttttttttttttgaggtagagttttgctcttgttgcccagcctggagtgcagtggtgtgatctcggctcactgcaacctatgcctctcgggttcaagcgattttcctgcctcagcctcctgagtagctgggattacaggcatgtgccaccatgcccagcaaattttttttgtatttttagtggagacagggttctgccatgttggccaggctggtctcgaacacctgacctcaggtgatccaactgcctcggcctcccaaagtgctgggattacaggcgtgagtcaccacgcccacccaagaattttaatttatgtggactacgcttacaccttgctgccctttgattttcttccaaacagcaatgtttaatcattttcttgctctcataggactaggttaacttaaactgactcattcactgatacagggcctacagcaggaagcccaggacctcccacccctcaaagcctttttctggcaagactgtccaaagcccctttgtcacgaactcaccttccaggcatggtatgtgcccgaggggtcagtctgatagagcctaggagtgccatcaaagtcgaaacccacgatgagggcagagatgccaaacggcctgcgcccattgctctgcgtataacgctagcaagaaaagaaacaggtcagtgccatccaattaagaaactgcatgtgaggaaagaaccgtacttagtgaagatacgaacattttaaaccatgcctgagccccttctcaggttatcagcagttcaaatgatacattagccaatagctttcaacatccttttctgcattttcactcctagaaaaactcacctaggaccagaattgtgaactcaggttactggaaattactttgacaggtagacacacattctgcttacatactaatggcgtgtcctcatagggtggcttccagcccccttcaactgctttgtgactggtcactcaggatggcaagacaaaagctatcatttccctccagacacaggaatttggaatatcccatgccaggaactgagaacagaacaatgttactgaaattggtgagctaggtcaagttacacttgtgcaagtcaagattaggatcacgccccagaataaatcagttttctgattcacctgaagtgacatggcaggaccctccatggcggagccgtgactgccctgctgccagaggtgagcatgcaagcgggcaggcacccacctgcttcagactggcgatgtagcgggtgatgtactccacagtgaccgggtcctccacagtcagccggtggctctggcactccacccgggccctgttgatgactatccttgcatcggcggtgaggcctgcaaggaaagcagagaggcttctgctagagagacagcacaaactacagggtggggacagacacgatgacccagcatttaaccttccacagaccccccaaaccggcagcaaggctattctaactgactggcagcggaacctatcagcccctgggaacttccaggaaattgggtacagatgcttcttgatgtgcagtggggtggtatcccgctaaactcatcgtaagtcaaaaatacctggctgaaaatgcatttactaccccataaacccattgtaaataaaaaattgtaggctgccgtgcagaatctggatttttaaaaacacagatcaacagggactgtctgcatatgaagaattgtgtacttcagaccatacttaaatacagtacctgagtcctcttgggaatcttagaaattgagttaatccctaatttcattacatgaattgagatcttcctagattgcatctgctgagaggagaaatgagcaagaccaaaacagcgctgagaacatggcgaggcatggcctgcatccaccagtgtggtcctttttactgctggggatggcaggacgtggttctgtcctctccatgccacagatgcagttagctctagaaagtccagcctttctctagattgtaactgattgatacagaaaaataacagtggaggtcaaattgcgcagcagccagaagtgttttcatccatttagccatttgtttcacctgctatggcagagagaggccaccaaagaaactagccaacttaaaagtccaaatccaattcttttaaatgattttcatttactcagtttatatggctcacaatagcccacacacccaagttaatctccaaagccctattcttcgctgagactctagagagtaagacagcgctccccaccgactcatacctgcaaaggccatgcagacgttgtcatccaaagcacagatcttccgcactgttctttcatcctgcagtttggccactgacttcttctccacaccaagaacaacaatgtctcttcctcgaacaccaacctttaattaagatccacaaaccacgtaagaaagtgatatgagtgctgggtgcagtggctcatgcctgttaattccagcactttgggaggctgaggtgggtggatgacttaaattcaagagttcaagaccagccggacaacatgggaaaaccctgtctctacaaaaagtacaaaaattagccaggtgtggtggctgaagcctgtagtcccagctactgtgggggctggtgggaggatcgctagagcctggaaggtggaggctgcagtgagccatgacggctgggagacagagacagcaagaccctgtcccctcaccccaccctatcctcccaaaaaagtgatacatggttctactgccaggcagcgagcagtaggagcagatctgaacctgggtcctggggggtacgtactccgggtagcagctcccactggaaggtgcgttcacccacacccctttctcctctacttgtctgtcactgtggctggcaccacatcctgcaaacccaggggtattcatctactgctggtagagctagcccaggcgtgctcacctaggtgcccaacctgggcctttcaaatactgagatgtagttttagttacaacatagctagtaagtaaccattatataatcggcatgtgtttcctttcaacccaatgaatcagtcccatgcaaagcctggaagcctgagactttcactcaagtctggtgttctgaaggcagtgtttctgtagttgtgaaattatattgagccacaatgcactgtttcctgcactgtgacatactcatgtgacagccatgagaaggggcctgatttgccgtcagtggacaaggtgtcaagtgttatcccaaactgtttatggctgatgctggagaaggatatggctgttattaaaagcatgaacaatcactgacagtcaacccgagtcaagccagaaacaaagggaaccatcattgggataaacagcgcctcctggtttagagcagggcttctccagctcagcactgtgagcacctgggcagggggatctccctgtgcctgccgccctgagcacgggtgggatattgagcagcgtccctggcctctaccctccaaatgccaagagcacctctgcaaggtcttaccactggaaaagtctccacacactgccagtggctccgtgtgggcccaaaaccatccctggctgagaagtattgatctgaagtgtttgggttttctgggagctttctcaggtactgactcacttgaccttcgactgactcgaggcccagagaagctatatgggttcgttaaagccagcggcggccagctggcgggggtggcagtattggggtgggtacaggggtcagccgactcctagtcctctttaagctgagttagatcacctgatgaatactgggccttcatttcaaaacaaagattcagaaaatgaaaacaaatcaaaatttacagaaccgtgtgtgctgctttctctgcctgctcaaacctctgaataccagatgataaaagaataacgatctcacagactgaccaattaaactgacacgtcttgatggtacgaatttaagtttcaaacaatgtcactaaggtcaatgtacacgagccctcgtcaaaacgaaacggccgcgtccaaaccagtcctgacccgggcggctgcagcccggccccgggaaggctcctcccggcagagtgcggagacctgggaggcgcccgccaccggccaggccagcgagccgctttgttctcgaagcccacctgggcctagagaataagtgttgccccggagcgggtgggggtccccataaggggggtttgagtagttcgctccccagccacccggctgcgtgaacagccccccagcgagcgcacggcctaccccccgcgctccgcggcccagagcggccctcgcccggcctctgctcgccggggcggcggcgcgacccacgcgcccggccggggccaggggtgctcaagatggcgtcgtcacggcccccgtgcccggggccccacgcgaggccgggccccaagcgaggcgctgagtggggagaacgagcgctcgcggctcacgccaaacgccgcctctgcaggcactcgtggagaccggcagcggggcccgcgctcagctacagccctgaccgcccgcgccgctgccccgcgcacgcccgcgggcgcccacagcgccgcgcccggccccggccctctctgggctccccagccccacttccgcccgcgtccccggccccgcgcaggccccgccgcctcaccgcggtcgagcccttcttgacggcctcctgcgcgtactccacttggaagaggtggccgtcgggcgagaagacggtgatggcgcggtcgtagctcatgccggcgggcggcggccgggctccttccgccgcgactctcaaaagcgcacactcacggcccgcgcgcacccgcgactcccggcgccactacgcccgcgccccaccctcggcgccgtgtcctgcgctgccggcgacgggcggcgtcaggcggcgacgggcagcgtcaggcggcgtcgggcggacgtgatggcgcgcgccggggcggggtcaggccgaaccaccggtggccgggggtgggaggcggtgctccggcgagggccgggcgctgggtgcgagggggtcgccgggggccaccgttcggcactgggccgcagaccgttctgcagggcggagcggcggcgccgcgggcccggaggcgcggcgacggcgacggggcggacgagcccacgacgcggcgccccccgcgctcccgcccccttccccccctccgcgactgcggataatgagcgcctcgggccgcccagcgcagccggagtatccacctcgatgaccacgggctgagccccgcgccgccaccatgtccgtggccttcgcgtctgcccggccaagaggcaaaggggaggttacgcagcaaaccatccagaaggtgggccgggccggagcggcggcgctgggcggcgggtctgcgggcgggcgcgcgcggggacggggcgcgggcagctggcgggcgcggggcgcgaacaaagccggggcgcagccgggcggccgcgagccccgacggcggccccgtgcccttccccgcgtcccacgcctgcgcgccggcgggcacccggccgtgtggggggcggtccccggagagcctgcgccaactttgttggggcgcgcgggtccctcgggccggggcactgggcggtgggggccgggcggacgctggaggctgccggcccccgagcgcgctgtcccccgagtccgcggcgcgcgctgggaactgtcctgggctatgccgggcgcacggggacccctcggggccggagccgcggcgagggcttgtcgcgctccgcagccagcttcggtggcgacggcgggcggtactcgttttctgcgctcattttggttagtggtgaggggcccgggtcggcctccgggcgcacttgcgaccgcggggactgtggccggggctgcccctcttgctcctggagcgaggcgcgaacgatggaggcacggaaggacgcgtcccgatccccatttgcggggcatcgttacgcagcccggccccgtagggagcgcaccgccccctccgtatcctcgcggctacgccgggtttcagcgtgacaccctcgccagccgcctcgcctaacaaacttgacggatttgctccacaacctttcttctagctccgtaagttcggccttgtggttttcaagagacagcgtttatgtgggtttgggacaccgttatccaaagccctaagttttgaaattgagactttgtattttctgctgttttttctgtagaagacagattcggaagaaaatcagcattagccatacccgtttcagttgtcacaacatctgttggaatgacattggttttttttcctaaactctgactccgtcttcaccctggtgggattgcagggataaacagtggtattcctaggttcccaggagccgcttgtctccctaagggggttcaccttgaccttgactgaggctgttattccttgatgacgtgccagtctcctgtggaagttgtcctaaatctatcgcctattttgagactacctttgctgttgctagttttagaaatttgatggtcttaacaaatgagaaccttggccaactctgaacaggagagattgagaatagcagaaatacagatttacaagtgtggcattttaatttacttagtaaacacttatgtggcgcttaccgtatcccagacactgttctaggggttttataaatcttgattcatccaattcttcatagaagctactggcatcccgtttaatagctaaagaggctgcggcctagggaggccgtgccttgctggtaagtggacactgaggcctaggggggctaaatgccttgctggtaagtggcacagccaggtgtcgatcccatacggtggctccagggtctgctctgttggtgccccttgatctgggaacatttggccaggcggaggtcaagctctaggctcagaggcaaatgttggaacccagagcatctcctggcactctggttttttggagcttaacagtcattgttcctgaagctacctttggctgcaacgtttatcccattatttgcacttcgcacacagttccattgaagctccccaaattctccaggtaaaagtgtgtattgaggtgctgccccgaacatcagatcagaaaggaagaaatgcacctgtggaccgtgggtccctgggcagaaactcagcctgctgaccattggaaataggccttcagtttaggctgctgacttggcttggtagggccagcagtctgcgtattgggcttggtgttttgacggtgaatatatgtacccagggatcttttactgggaggtgtgagaaggctgagaaaggtgtgagaggtgtatgttctatgcctcagacgtgtgctgtgtccacagtgtgtgctggtagtgtcatgccgagagctttaagagaagccagggacccctctgaagcctgcgtggtagtgaaggagaaggaagtctacaacttgtccttacagcattctgcgtggtagcgaaggagaaagaggtctacaacttgtccttacagcattctgcgtggtagtgaaggagaaggaggtctacaacttgtccttacagcattctgcttggtagtgaaggagaaagaggtctacaccttgtccttacagcattctgtgtgggtggagatcttccaggccaacttctactcaaccttcaaagcctcactcacgtgttccgcgtctcatgctccgtcggcagtcatgtggcccttgtagcacttgcttgagctcctgagtttggcatgtgactgattattctttgctgatccccagcctctcatagtgtctgagcacagttagtgctgagcacgtgctggatcatctgtgacgctggtcccatcagtggaagcgttttgagataagcagatgcgttcgtgtcctgtgacttccttgacacattcccacaacccaggtggcttcaaacaacagaaatctattccctcacagttctggagaccagaagtcccaagtccaggggtcagttacctgctcttctcctggcttctgatgactgcgggcagcccttggtgttctctggcttgtaggtgcatccagcgtgtctctgctttgatcatttttttttttttttttttttgagatggagtttcgctcttgttgcccaggctagagtgcagtggcgcgatctcgggctcacaacctccgcgcccccgcccacgttcaaggttcaagcgattctcctgcctcagcctcctgagtagctgggattataggcgcgtgccaccacgcccggctaattttgtatttttagtagagacggagtttctctgtgttggccaggctggtcttgaactcccgaccccaagtgatctgccccctcccccccttagcctcccaaagtgctgggattacaggcatgagccaccatgcctggcctcaatttcccactttttataaggactctagtcactggttttagggcctaccttaatccagcatgaccccgtctttatttcattttcaaatacctcatttccagtacctcccatgcgcaggcaccaggggtctgggtacagtttagcccacgagagtgcgtttgtggtgagggctatcccagagaaagagaaccatggggcaggggcagggagtcacagagggtcccgagcctggcctgcatggagcaggtattgggggacctaaagtggaagggcagggggtgctgggctgatgtggggagggtagctggtggtgaccaggcagcagtgtgtgggtgagacagtcagaactgctctgtggcaagcaccacagaggacatgactgtgctggggaaccctgcggtggggctgggccatgtccccacggtggccctgggcctggctgggtgttctctagccaccagctggggactgtagtgttctgttgtccagtgcgtgctccttacgctgctgttggggctgggcctgcagtggtcacctcggaccatgtggccaggcttgaaggggacccctgagttgcctctttgctgcttggcatgcagtaattgctcaataaatgtgttactgtttctgtttgtattggttttctcattggtttccttggccggataatagcagtggtgtctgcctgtctgctgggtgtctggatccccagcacctgttgcggggcagggttggggaaaggctctgagggaatgggatggagctgagaggaggtgggcccctggggccgcctgctgggtgggtttggtgtgggaagacaagaccttcgtggggtgggttagtgccgtgcccagggtccgagagccagggagttgttgaagctggaccagccctaccccatgtccttggtacccaggtgcgggggtggggcatgggcaaggggcgcacttctgggtggggatgggctgcggaggatggggtgcacacccagtaggcagtgggcaccctgtgtgctccctcagaagtggaacttgctgtctgaaggaacgcaagctaatttggctaggagtgtttgtaaggttaaagctgtccagtgactgaatggcttggggatgccgagcctcccttgcatgtggctgattgacagcgttcctcctgcgatcagaggctccccccacccgagaaggggagcatgggggcctgtctttacatccgcagggataggggggttgggtcccctcattccggagcctgggctcagccccggggagggaccccgcagccaccggccttgctcggcctccttgctgtcttaggtcaggtgagggaggctcggcctccttgctgtcttaggtcaggtgagggaggcttggcctccttgctgtcttaggtgagggaggcttggcctccttgctctcttcggtcaggtgagggaggctcggcctccttgctgtcttaggtcaggtgagggaggctcggcctccttgctgtcttaggtcaggtgagggaggcttggcctccttgctgtcttaggtgagggaggcttggcctccttgctctcttcggtcaggtgagggaggctcggcctccttgctgtcttcggtcaggtgagggaggctcggcctccttgctgtcttaggtgagggaggctcagcctccttgctgtcttcggtcaggtgagggaggctcggcctccttgctgtcttaggtcaggtgagggaggcgctctgcaaggcccttgaacccaagcgccacgggggaggtgggcaggagaaaggcattgtcctggagggagcagccacagcctggcctctgtcccccctctgcctgtaaagcctggccatacaccctcttgctggatgctcctgaagctgctctcccaactcctacccagcctggagggtgaggacgcatttggataaagacactgtgcctgcccactgccctttacccgtgacctttccaaggctggtgggtctccagagtccctgtctgccatccagtcgccgggtgtggagtctggagccagcagccaaaggcagcccaggtcttgcccaggtggtgctcgctagccggcggtcctgcgggtgctctcctcgaggctccggccctttgcgcggtctgggccctgggccagtgggtcggggcctgggcacctgcctctgtgtgcttggagtcagaagacagattccctggaatccccgggctgcaggtggtggcagtgtcacgcccgtccccagtggatgcaggaataaacaggccctgggtgccgagcagttagcgggctggcgctgatggaccgtaaggcctgtggggcctgggaggcctgggaagagggagtgcaggtcttcccgcctggttcgggcaggcacctccaccacctccctccatgtgatcacaagaggagtccaaagggttgggagaaggtgccatggatgatggtaggaagggggctcctgtgacactggtctgattctaatcggccaccacagctgctgtgcacaatggggacggaaatgggctgtttatatcctcctcaaatgggaaataggtgtggaatgcaggcaggtccttggtgttaccaggatggggatgggggccatggagctgcaggagggcagggtggggcaggccgggcctcctgggctcacattcttatcctgctgatggtgatgtgtgcttcgcctttctgtgccccagtttccttgtctttacgaagaggacagggctgtggcctccctcatagcctgtatgggtaaggcaatgcccagcagccttgtaattggtcagctttagcctttgatcaggcactcaacgagcaaggaatggccggaatttatccgtggtattcggaaagggaggtgaggactccattccaaactgcaggaaaccatcgcaagtccagggtcatgtcagaaagaaaaagcagtgtcagcacatggatgagatgcatacagacgtcgcgtgttgctagtacaataagcacgtctccagcttggaaactgtcaggagcacagtgattttgttgtgttgtgctgtgctgtgacagcccaaagcgccatgagactggaagtgattgccaaggcacatgcagaggcggctgctcttgtgtctgttcagcgtgtcttcacatgttcttagagtctttgaaattgcacacacacgtcaagcatacagcggtggggccgtgaggcagcagccagctcctctcaaggagactgcacatgtgtaaattgagacgctcttctgaaacctacacaccgacttcacggattccacagttgggtgaatgttcagaggggtcccactggcttccatcagtggagtctgtagtatcggcttgctgacctcgggggcagggacggagcagctcaggctgggctcagagggaaggactgctgatgggtcagcgatgtctgccccgagaacaggagtggcaggcgctagcgcaggtgccatcgctggcttagccacctgctgatgctcgaccagctctccggttagccaggctggtccccctcacaccttgatgactcctaggaattgattctgcgtctgtgtccacgccatgcgtggggagtgcatggcagccctgcatgtagtggcagaagacggggaacaatttcaatgtctgtccaagcagacagagtactacgttgtgtccatgttgtggaattctccggagcataagaaacattgaggtggatttttttttttttttttttttttttttttttttttttggagacagagtcttgctctttcgcccaggctgaggtgcagtaacgtgatcacagctcgtgcagccttgtcctcctgggctcaagggacaggtgaggtctctatgtgctgacagaggacagtctccaagatgtttgagaggaaagggagctgtgtggagcagcgggagcgaaacgttatcaggtgtgtgcagagtcgggaggggagtgcacaggctccatgccagacgcttccagaatcggcagagctggcctctggggaagaggagccaggggttcctcctgcaaaattaaaaaggttccaaaagtctttgtaattagaaaggacaaccatgaggacactggaggtcttcctgcccagtgtgggctgagccagccccggcagtgagcctcagagccccaggcctcctctgtctggcttccagggccccacacaggttgtcattggggagagactgttctgctgagagcccctcacccaggtttttgcctggtagccccagcccttcccctactctctgtgggctctgggaccccagttctccgtccctggttctcatcctcactccctcgcctacccagttaggaccccacggtggggcttcagcagccccagaccccatccttggtgcctggctgtgccctgggccctccaagccaagccccgtgtcccccgtcagtccccgcttgccaaatccagtttctctgctcacccacatggtccattgccatggccgtggcttccgtgccccttgggtttgtctccctgtgggtgctgggcttggccctgggcatcagccagcctgaccaacagagacacgttggggccacccctcagagcctgagaccacaggggtgaccacgcagagagggagtgggaggcccaggtgtcccagctgccccagccacgagcccagccaagcccagcagaagatcctccgaaccagcccagaatcatgagaactaagaaatcatgtttcaaccacgcggctccgggaggtttgttgcgcattgggtaatggatgcacccagccgcgttgggatcttggtccagccagtctctgcagtgagcacaggctttggttgagaaagtcacccccacaatgggcacaggactcctgtcccccagcagcccccgttcccctcttttcccgctccccatagctggcctcccccgttcccctcttttcccgctccccagagctggccttccccgttcccctcttttcccgatccccagagctggcctcccccgttctcctcttttccctctccccagagctggcctcccccgttcccctcttttcccggtccccagggctggcctcccccgttcccctcttttcccgctccccagagctggcctccattcctggagatgccccgtggccttcacacatgcctgtttcctccatcgggccgcccttcccccaccttacccatgtgctcctgcccagcctccagcccagctggacgtcaaccccaggagtctcctggggctccgctgcctcatggcattgagcagatgcatgcccacgtcggtcttcacccgactggccacccacgcccactccaccatgagcagagcgggtcgcacctcctcactgtcgcctccactcacccaggcctaggatgggcacattgatgaagcatgctcagagatgggatctcaccacccctccttgctgcggcccccgatgccagcctctggctcctccagatggagttgccacctcatctctgtccccagcgccctcacctcgggaggcctcaggccaccagcttcagtgctttcccggtggcgtctctggcgcgggtttacccctgaacctgtagaaactcggcctcttaggaaagggtggggagaactgtatctcacgttgcagaaaaattcacaagtgcacatcaggaagctgggaaacagtgtctgcagaagacagcagtaaatacagaagatctagaacgctccaggccgcgtgaatggcttctttgttcagcttagtgttagaggtacacaccaggtggaggagactcaggtgggcccatcaccagccctggcaaccccagactcacttcaggcctctttaaggtcgctttgcagatgataccgtgagtaaatgcttgtcttagagattttcataaacacagacacataagaaactacgaatcgacaacctccagagtgggggccacagctgcctgtcggtgcatttccgtcctgtcagggtcttttgctttggattttatgctcaccaaagccgcgcgtgcacatcaggagtcaagaagcaccatgggcgtgtgtgttagttgttcttacactgctatgaagaaatatctgagatggggtaatttataaaggaaagaggcttaattaactcacagttccacagggctggggaggcctcaggaaacttagaatcatggcggaaggggaagcaaggcaccttcttcacaaggcggcaggaaggagaagcgcaagcaggggagatgccaggtgcttgtaaaaccaacagatctcatgcagactcactcaccatcacaagaactgcatgggggagacagctcccatccatctaatttcttcccactgggttcctcccacgacacgtggggcttatgggaactacaattgaagatgagatttgggtggggacacagacagaccctatcagggcatgagtaacctcaggagtaatgcctcccacctcccagaggcgctgtcttgcccttctcaaggccaaaccaagtggccactttggaatgggtttagggctgctgaccttacctggtgaccagggagaacaggtcacccgataaggtctgccctccccgctgcacacctgcgctccccactcatacccgtcagagtggctttctcgggggttggatctgcctctgctgttgacgtggtgatgataaacaccttgctcactgctgaaccacgcaggaccgtgtgactgcttttcctgcctggcttttgttttccctggagttgttgattgtttttcttttcaatcacttgtcactagtgtatctcctcctttgctcaggtattcttccgggtttcagtctcggggctgctctccgtgggtctcccaccattggccgaattcctttggcttctcttgggttgggtcttgggtcttctcctgggatttgctcccttggtttggggagggaggcgcatcattttatggcctcctgagaacaggtgtttgggatgtgtccctttaaacagaattcccacgctcccttcactcgactgctggcatgttaacgccacctcacttgctgtcccctcccctcttctgtcctgtggacacgtgttattcttgccctgacaatttgagaatgagttgtagacttggtgcccctttactcccaaatgcttgaacgtgactttgctgccaacgaggacatgacgccgtacaaagattgaaacgggggagctgacatggcagcagcacagccgtctgctccaactcactgtgacttcccagttgtcccggtaatggcttttgtaggacatcattaaggattactggaaggaccctgggaccatgtctgttgagaaccacttgttcatcttccttgtctttgatgactctgacagtttttgaagaatgccggccagtcatcgagtgcccttggtttgggtacaaggtgcgttttcctaacttgcgggtctgaaagtgcgtccattcccccttcacgcctggttgcggtttcggcggactagaatttctacgcagaagtctccctcaggatcagaccgtagcccttccggaaacctccatggtgagttcatctctcctccagagcctccctcaggccaggccatcggccccccagaggtctccgttgggactgggtcatcacacctcagggggtgtcccttggtatgggacacagctcctccggaagtctccgtgaggtcgttgcaccctgcgggcccatgtaggaggctccgtgctgtcggaatccactgtccttcacgtggaacctggtttttctctcctgtcatgtttaggatctttctttgtccctggtcttttttggcaaactggtcacctgggggcccttccaatggggaaatgcgtccttcagctctgagaaaatgattgaaggatttgggggtgatttcttcactgctcctgtctctggggctcctggagggccgcgctggcccactccctttcttcgtgatctttctgttttcacctcggtcgatccgtcctgctttccaggactcctcctcaacttcatatcccgcccctctgttgaattgtgttctgactaacaggttttcacctccagagctcttctgccccctctgttgtttctaactggcatcatcttcttttctggggctccagtaacctgcatcactgcaccggctgactttgtgaggatattaataataggttttgttggatttttttaaaaagtttcaggccgggtgcaatggctcatgcctgtaatgagcacttggggaggcagaggcgggcagatcagttgaacctaggagatcgagaccagcctgggcaacacagggagaccctgtctctaccaacaacaacaacaaaaaaaacccatttagccaggcatggtggcacacacctgtagtctcagctactcgggcggttgaggtaggaggatcacttgagcctgggaggtggaggttgcagtaagccaagatcacgccactgcactccagcctgggtgacagagcgagaccctgtctcagaagaaaagcaaatagaaaaagtctccgtcttgcataaccttcatctttggattttggcctctgtggctggttttggcctttgtctttcaaatggcaggtgggggccgcaccgctgtggcttctgcggattggaggccggggcactgcctgctatgctcaggcaggcgtgtggcctgtggttcactctgaggtgctctttcccttcagtgcccaagcatctttcctccaggctggtcactttcctggagacgccccctcctccaaccccatctcctgccagcagatcctgggcgaccctgaaaggtgccagaattttaacattcctgagccttgtggggcttcgcagcacagtgtggctcaggccaggtgccctgggggcactgattcagttgttactcatccatgtgcttttcagcttccaaactcccgctgctgccatcttgtgccctccccattctgtccttagaaggccacacctgttccatccttagtcgccggccggggcctggggtttggggtgtccagtcttccacctttcattctgcctgtcctgccctttttcaagtgggtatgtgtctaacatacatgagaaagttctctgtatccagttttctaaacacccacaccagtactgtgtttcgtcgtgcttcgtcgtgcgtacataaacctcgcggcactgccctggccagtgcacacccgcggggctctgcctaatgaagtcagtggcttgcgccccccggcccatcccggccccgtgctgggagtgatgctgaaatgcccgccgtgtctagttcgtgtccctggagacaatctctgcctgggggttaggagtcaaggaggggaagccctttagaaggaaaggaagaaagcccatagttgtcccttcctgcagttcatctgaaggcagagccatctggaatgctggcgcctggcaggtggactctccctcacctgcccactggtaagcctggcccacagtgtcccctggcggccccccacccccatctcaggatggctcctcggccccattgggctcagctgagtgcagggcaccttgtccccagcagggagaaaagtggtaaagagtggaaagggggaaggtataactttaagaaaaaatagagcaggagaaaccaaccctgaagtcgtggagaccggcggaggaggaagctgagttgagggcagtcactcagctggggctgtgggtccgggctctgccctgtgagctggcctggcttggctctctccaccctgggctccctctgcctgtggatgagtttgggccccaaggtcaaatcgcagttagaggggccacgttgcagggtggaggcacagctgggtggccccaaggccccaggcaggcaggtgggctcctcctccccttgccctggggctcccctgctccagggcctgtagagctcctgtcgggagcggcctcctagggctgagtgacccagcacgctgtagtggagccaaaaggcactgctttttccttgggtgccagcctctgagaaaaggcctttttatgaaaagcagcaggcgtggtgggctcagttctgtgcctccctgcagacagaggcagctggtcacagggcgggtgtcgcctcttctcagtcccctcccataccccctctctcctctctcgcctcccgttgggtctccgcgggccacccagtgctgcccccaggtggacaccttgaaagagccggctctcctgtgcctgctccccacggcctgtgggcgtcctgtgtggtgtctgcaggatgccgcctggccccagcccctgttcctctgctgccacccacccctccccacttctaccaaccaccagactcagcacgtcctgactacgtgcaggtgtgtggacgcaaggccttgggccgcttgatttggggagtgctccggagccctcctggggccacagagcacgttcaggaggcgctttgggaaggaaacctggggaatctgtgggcccagccccctgctgctcaggtgtggccaggcacgtgggtcaccaggtcagagacaggctgagcccctgcatctgacaggttcctggcagtgcccatcttgagcgcagaccgtgcttggcggagtgtatgcctggccgtccctggaccagaagcctccattttgccagttctaggagcacgtggcgcctgcagagagacccctggcccagctctgggaggcccacatctggctgttcacctgagtcacttgaaactggtttaatctgggtttagggtcatgaccttgtctgtgcacacacactttatgtgtaagacacggaaggttcaagacgggaccggccttccctgtgtggcctgtgggcctatcgtgccgttctcctgcatttcagcgcagcacccctgggggtgagggctgcggggtgccagccccaggtctaggtcatgcccggttccgcagtctcacgcatcttttctgcccccacgccggcctgtgtgtgtgtgtggtttcttctaccggtggtgccgtccctgacccccccagaccctttccttccctccctcaccgcggttggtgcagcccctgcaggaagtctcgatgcccttaccacctgggagtgccctggacccctgctgatccttgggagggggcagttacctgtgccccaccctgtgtggttgcaattcgaggctatcccctccagctaggggcaccagggcctcttgtggggtgcccacagggtcctgacatccttgccatcggcttggctgacccttgctgcacagatgctctgccgtcaagggccctggaagctggagggtccttcgggctgggggctgctgggggcacggggcctctgtgttttcatttgtgggcttagatggccctgccgcttacggatgaagtccccagcacagggaggtgtgaatgttcggtctgtggtggctgaggcaatgcacgtaacgacagtttcgtatacagaacaggcgtagcatccgagatctggaaatttgaagtgctccaaaatccagaaccttttgagcaccaacatgaggctcaaaggaaatgctcattggagcattttggatttcgggttttcggattagggatgccaaaccggtgggtctaatacagatatccccaaatctggaaaaatctgaaatctgacacgtttcacgtaagggacgctcaacctatatgaaaactagatgtgtagcgatggctgttcatcccgagggtcagcgacagccccgcgtcggcagcgcccgctcacgctctctccgcagatgctggacgagaaccaccacctgatccagtgcatcctggagtaccagagcaagggcaagacggccgagtgcacgcagtgagtgcccgccatacaccggaacacttggagggtgtcatgcagagtctaagcacagaggccagatacgtcccaagagtcccccagcacagagatcagataagtcccaggagtccccagcacggaggccagatatgtcccaggagtcccctgcacagaggccagatatgtcccaggagtcccccagcacggaggtcagatatgtcccgagagtcccccagcacggaggccagatatgtcccgagagtcccccagcacggaggccagatatgtcccgagagtcccccagcacggaggccagatatgtcccgagagtccctggcacagctgcgaagcattgctgccagaactggggtagttctgagggaggcggaaagtgggaggcaggagcagtgtggggaggcctgggccagcctctctgggcagctctgtggccaacagccagcgcaccaggagacagcacctactccaggtgggacctcctgtgaccctgtgaacctagggcctgatgcgtaggaggggtgcgtggccagtctgccaccctccaagcggctgtccaagtggccgtcagactgacctggaggtgggaagtgcgtgaatggcctcagacacccctgggtgtgggtggggtgaagggactgggtccccactggtgcgaggtatacgaggggccttccctggcagaactgtgcttccccatttctttccagggctttctcagggtcgttggctctatggagtccgcccactgcctggctcagctggacgagggctctgtccctctgtcaccttcgggcccctgcctcctcgtggcctccccccatctctatcctctgaacagaccaatgccagcttccgcttagctgttaccttagagtctttccagagtttttgtcatgggttgggagcctgctcagggtttggggtagaggctgccctcccgtccccaccgagaccccagcaccctgccacctgcctgtgtccagctgggtgtcatctggggtccatgtcctcatggggtttggctggatgtcaggctgtcttgttcacactttacttctgccttggatccacgtggggactctgtggtcccgtcgtcctgcctcatgcgtgccccctctcctgcaggtaccagcagatcctgcaccggaacctggtatacctggccacgatcgcagactccaaccagaacatgcagtccctgcttcctgccgtgagtacccacggggggttggcctcctttacccagcaaggactccgacactgcctaagatcggaattgtgggcatgtcatctcaggtagcaaagatgactcagagaaaccaaaaataccactagagccaccagaaatgggagtgtgggcggtggtgaccaacccttcctgacagactgggagtaatgacagcgtctgaggtggccaggtcagaactgtggctcagcctcgttatgtattgaagggagggaagccccggagaagccactccaggagcagccgcagctctcgggtcgggggtggggagaggtgggatggggagaggtggggtggggagaggtggggtggggtggggagaggtggagagaggtggggtggggagaggtggagagaggtgggatggggagaggtggggagaggtggggtggggagaggtgggatggggagaggtgggatgggggccctgcgtctccctggagcctctccgggtgctttgagccactgtgaaccgtgcacatgcgctgctgtgggtgagaacggaacttaaaagagaacatgcccagcacagtaaattctcccagtgttagttcaaatattttattttgtttgattttttaaaatgcatttttccaagattaaattgtcacagtgaagacgaggtcgtgctgctgcagcctctgtcctgctgacggggttccgggacagacatgtcgccgggaatgacgtatctcctagtgacccttagtcctcggcaagtgatgacataaatgccaggatgtgtcttgcgagtaaaaatgttaaacccacctccattgacctgtcaaattgcacttcttcaccctgcagacacccacaggtcctggtggaaatttccttttcttggccaggtgtagacagcatgtgtgtgcagacctccagagctgctggttgaccttgatctgggagagtgctgagggccacttcacactcactcccttctgtgcggtgtgatccgaggcgggtgtggggtgggggtagtcggggaaggggcacatgcagcaggagcacgggaaacaggagagggatcccacctctgccgaagctcttggcacggaggggtcgtggttggggagcacagaggcgctggtcacctgcgcccgagggggacggggtgcgttcagcctggtgggccgggaaaggggttccctgctgtcccaggaggaggtccagcttttcacacccaggcacgtgtggatgaacttgatactcagtagggttgtgaacgctcacccagatgctcactctgccatctccatctgggcctggtgctctgcggtcacctggctgtgacgatggctgctgattacgaacattgaccaggtggccatgatgtgtggcggcaaatctcgggtgccctctcatccctggcctggcttgtggaggtcgctctccgtaaattaaccgtttttccctgaaaacttcctgttgcctgcagccgcccacgcagaacatgaacctgggccctggagccctgactcagagcggctccagccagggcctgcactctcagggcagcctgagtgacgccatcagcacgggcctgccaccctcctccctcctgcagggccagattggcaacggtgagtgcggcgggggaggaggacgttcctggctacgaggccaccaaggcagcccttgggcagccggctgccatggtggggcaccccacccctcacagggctgggcatgggacccactcctcctggggtagccacaggtcggctgccatcgcccaggctcagggccgcagcgagcgtgccgtgcggctgggctgagcccctgctccagttgtccactctctctgacactgtcacgttccatcaaattcaaatgcaagttgcggggttccaggtggattgtgtaataggaatggaatgctcctgtctttggattgagaagcatggataacgtttggagaccattaacagtaatataacaggccgggtgtggtggctcagatctctaatcccaaccctttgtgaggcctaaaccagcagactacttgaggccaggagtttgagaccagcctgggcaatatggcaaagccccatctttacaaaaaataaaaatattagccgggtgtgatggtgcacacttgtagtccaaactgttaaatactcgggagactgaggagagagggtcacttgagcttgggagggtgaggctgaagtgagccttgttcatgccactgccctgcagcctgggtgacagagccagaccctgtctcagaaaataataacaaaataacaacaaataaacgattcatcctgtgctttgctagcatgtacgctgctttgttttcttttcttttttttttgagacagagtctcgctctagtcggccaggctggagtgcaatgggcatgatcttggcccactgcaacctccgcctcccgggttaaagcagttctccggcctcagcctcccaagtagctgggattataggcacgtgccaccacacctggctaatttttttgtatttttagtagagacggggtttcaccatgttgtccaggctggtttcgaactcttgacttcaggtgatccacccacctcggcctcccaaagtgctgggattacaggcatgagccactgctcccggccacttatttattagtcacttaatcattaatagtgctgttgatagcaactcttcccaaagtcacttgaagggaaattggggtgtcttcaccttcagaagtggtgacctggctccccagtgcctgacaccactccctgctccccatgccagggccgagccacgtgtccatgcagcagacggcgcctaacacgctgcccaccacctccatgagcatctctgggcccggctacagccacgcgggacccgcctcgcagggcgtccccatgcaggggcaaggcaccatcggcaactacgtgtctcggaccaacatcaacatgcagtccaacccaggtacctactctgcctctgcaaccccggggggcctgggcctgcctccaagacccttgacacatgcacgttggacatgtggtcccggggaagctgccctcctgctgggtgctggaggggaggggcccgtgaatcggggctggccgctgcctctgagagcttccggagggatgggcgccagtgggtgcacgatcaactcctcctgtcccccagctttgcgaggggctggggtgtttcccatggagtctcagggaatgccccagggagtgggggccactggccctgggtctggacagacagcactgggctctcagaggtggggtagagtcggtgcaagcagcgggtctgagcttgcagggcgtcagtgcaggccacgtaggggaggcgtgccttgcggtggaggacgctgtcctcgtggggagcacaggaaaataacgaggaacccgcccgggcgcaggaggtagttgggtgtgggagggagggcgggaggcttcccggggtgatgtggggcctctgtcctgtcgttcagtctccatgatgcagcagcaggcggccacgtcgcactacagctcggcgcagggcggcagccagcactaccagggccagtcgtccatcgccatgatggggcagggcagccaggggagcagcatgatggggcagcggcccatggcgccctaccggccctcccagcaaggtaacgcccggccgggccaggtcgcgggcacagctgaccgccgcgggtcgtgaagtgccaggctgtgtgtgcttctcttcggggagcctgggggagtgaggcggggagcctgggggagtgaggcttggcgccttggtgttaacattgagtgtggaccctgggggtgagggccagggtgtggcccgtggagggtctgctgtccccgaggagtcagtgttgggggcaggggcggcagttgtcattaagagtgtcacaggccgggctcatgcctgtagtccgagcactttgggaggccgaggtgggcggatcacctgaggccaggtgctcaagaccagcctggccaacatggtgaaactctgtactaaaaatacaaaacataagttggatacgatgacagcgtggggtgttctcctcgggtgggtgaggccattcagcaaggccttggcttccccagtgagcgagcaggtcctctgagggaggagggcgcggcccgcactggcgctgaatgtggttcccccgcaggctcttcccagcagtacctgggccaggaggagtactatggcgagcagtacagccacagccagggcgccgcggagcccatgggccagcagtactaccccgacggtgagcactggcggcggcctgaccccgcccaggaacgcagagcagctgcaggggcaaggagggcaaggagggcaaggagggtgtggccactgcagtgtgtcctcagtcattccagctcaggcctgggctacaggcagagtggccagacgccctgcaggagcaaggtaggggatggggtgagctgggctggcagtggtgcctggcctctgcagagagaagctgtggcacacaccgctgcactggcctccacgcggccttgcctctacttcctgaaaggctgtgggagttggaggcggataattgtagctcctagctgtagataggtggaaatgttcaagaaggcgcctcccagcttcacagagaatgccctgaaggtgacggctccacctgcagcacctctcctcctgcaccttctcatctctgcagagtattttaccgtcgtcacctttcagtctttgcatagtcccagggcttgtggaagggatactgaaagtggtcttggctgaaaacagcggttcacacctgtcattccggcactttgggaggctgaggcaggaggatcgcttcagcccaggaggttgaagctgcattgagccatgatcgcaccaccacactccagccttggtgacagagcaggatcctgtctctaaataaagtaaaaataacaataaaataaagtggtcttaaaggctggattgatccctgggaggcatccaggcagggagctggcctcagccagcaaggggcaggtgcacagacaggtgggcaggtggcagcagggcaagccaccctggccacgtgatggtcacatgcagcgaaggcctcggtaagggttggacacccctgcctgcgtcctcccaggagctagcggtggcggggagaaggcagtcgggtcactagcatggctgtgtggcaggcactgaaagcgctgatcctctgcataaatccccaggtagcttcacagtcgccccgagaaggaggcattgatgtctgcatttcagtggggaggccgaggctcaggaggttggggcatggttttggggaacacgggtcctgccggctcttgttgcctccctggccagacaacatctccccagcctgggtctcagttgcctcctccgggacctgtgcagtgcacagcctccgctgactgtcgccgtctccgtttcgcacaggccatggcgattacgcctaccagcagtcatcctacacggagcagagctacgaccggtccttcgaggagtccacgcagcactactatgaggggggtaaggagcacggctgcgtgctgggctcgagcgtaagcgccacacgcagcagagttaagacgctgcacccttaggagcacgcggtgcctgccttcagtgagtcccttaaatcacagcacagcgcgtgggaggagagacagtgtgttctggaagctggaaattcaggctgtgtcgggagccccgcttgccttatgggtgtgttcgtgagacaggaaaggattcagccggccatgctggggttgggggcacagacttggttattgggtccagccagggagcgtggggcctgcgacaggaaggattcagccggccatgctggggttggggacacagactctgttattgggtctggccagggatcgtggggcctgcgagccactctcagagcttcctcagctggaggccagcagtggctgcgctgggtgtggcctcgcgtttcttcagacacctgcaggccaggaaacgcacatctgtggctgggggcttgccgcccttcatggcggtcctgggcagtgctgcgctgggggctgcgtgtcgggtggacttgcccctttctgtggtgtctgtgcccccaccctggctgccctgaaaccccaacagaacatcccagaatgtggagttgggaagaggtacacacagcccgttccagtcccaccccgggataaagatggcccccagagaagagctgatgatcgcctgcgggattgcgcaacctcgtccgggagggaaggcgggcctgcagtccctggggagaggggcctcgtgtctgctgacgctgaccggcaggcagcagtggctgaggccttcccactgcagggctgcaatttatcaagaggtaacagtgttggtgaggcttcaccaggtacacaaagcaggcaggcactaaacggctacagatttccttgtttgggttacttcttaaagaattggatgtgtaaaggttttgcttctgagcttacacatctcagcctgctgtgaagaaataaagcacgcaagtgtaggcacatatagaaacatcacggtgtgcgctacgaatgcctgcaacgttgaaatgtcagttacacctttgtaaacctgggggaaacaaaaagtacatgaatacataatgaaagtttaaaagaagaaagagcctaggtgttgtggctcacgcctataatcccagcactttaggaagctgaggtgggtggatcacctgaggtcaggagtttgagaccagcctggccaacacggtgaaaccccgtctctactaaaaatacaaaaattagttggacgtggtggcatgtgcctgtaatctgagctactcaagaggctgaggcaggagaattgcttgaacccgggaggtgtaggttgcagtgagctgagatcatgccattgcactccagcctgggcaacaagagtgaaactttgtctcaaaaaaaataaaaagaaataaaaaaaagaaatggccaggcatggtggcttacgcctgtaatcccagcactttgggaggccagtggaggaggattgcttgagctcaggagtttgtttgtttttttttttttttttttttgagacggagtctcactctgtcgccgaggctggagtgcagtggtatgatcttggctcactgccacctccgcctcccaggttcaagcaattctcctgcctcagcctcttgagtagctcggattacaggccccgccaccacacccagctaatttttgtattttcagtagagatggggtttcatcatgttggtcagtctggtctcgaacccctgacctcatgatccacctgcctcagcctcccaaagtgctgggattacaggcgtgagccaccgcgcccggccgagctcaggagtttgaggccagcatgggcaacatggcaaaaccctttctctcccgaaaaaaaaaaaaaaaatgccgggcgtggtggcgggtacctgtaatcccagctactcaggaggctgaggtgggagaatcgcttgaacccagaggcagaggttgcagtgagttgagattgcactacagcactccagcctgggtgaccgagccagaccctgtctcaaaacaaaagccaccctgtggccagcacccagaggctatcttctggcatattggctgcagtggtgcctccgtaagccctgggagtcagcaggatctctgccatcatgggcctggccctgtcccttccagctggagcacagggttcagccttgtccatggcgaggtgtccacatgcgtctgcccaaggctgccacactttgtcccaaaaacaaacgcaggatgtgctgctcagccttttagtgtctgatgtagctactttttttttttttttaaagagacagggtcttgccctatcacctaggctggagtgcagtggcctgatcgtggcacactgcagcctggaaatcccaggctcaagtgatcctcctgcttcagcctctcgaattgctgggactaaaggcatgcaccaccaggcctggcttttttttttttttttttttttttaatttttgtagagataaggtcttgccatgttgcccaggctggttttgaactcctgggctcaagtgccacctcagcctcctacagtgcaggggctccaggtgtgcgccattgtgcctggctgataggtacttccgtagcttgttgtgggttaggtactcttgccttccatcattgatgagaaatttgctgaaaagcttagtaacctcttaaggccagtaagacagatggtgtggtttcctccttgatttagaagcattttattccatctgtttgttagactctgacatgaggagtgcacatacatggtgacactttaccctacagcaggtggtactgtgaagtcttgcaggggtgagaggcctggagatgctttgctttgaagagattggcggatgtgtcatagccaccttcaaacacaactgtggcccatggtgcagtggagaggctggggggacgttaggaggaatgggtcaaaggcaccataaagaactttccaggccgggtgcagtggctcccacctgtgatcccagcatcaggccaggtgcagtggctcccacctgtgatcccagcattgtgggggccagggcagaggatcacgtgagcctgagaggtcgagaccagcctaggcaacatagtaagaccccctctctactaaaaaacattagccaggtgtggtggcatgcgcctgttgtcccagctacttgggaggctgaggcaggagcatagcttgagcccgggaggtcgaagctgtacttaactatgatcacaccactgcgctccagccttggcaacagagcaagaccctgtctcaaaaataaaaagaattttccaacttttgagtcatcccacagcaggatgagtgggacaggctggtgctggaattgttcctggtgacggcatcagtcaggagcctgcagaatctgataaaacgagagggtgttcatgcgcagggcaccagtaataggaggggaccagagtggggctgaccaagccaggaggggacagcgggggccacggggtcacttgtgctgggcaggagcatcgggatgtggtgctcggtgggggaggggccaggagagggtgcgagtcccgcgttcgcgtcacagtgaggtttgcagtgacgcatactggacagagcgcagcccctcgtgacctggcatctgggcgccattgctgctaggagagaccgcccatgagctgccaaagccaagtatggagctgggcgcatgggatgtgcctctgtgaaaatgcaggcaagaggagactgtgcccttgcacacacgcacactcacaccgtcagccaatggacaaacaccaaaacaaccaacacaaatgcttccgggtaggagatggggttagggctcaggcagtccagagcaggggtggaagcggccaccttcccaggacctcttgaaggtatgagtccgtctgtatgtacctttgaatcatgtagatgtattggcagcttcagaagttaaattaaacatcattggggccgggcagagtggctcacgcctgtaatctcagcactctgggaggctgaggcgggtggatcacttgagatcagtagtttgagactagcctggccaccatggtgaaaccccatctcgaccaaaaatacaaaaactagctgggcttggtggcgcatgtctgtaaagccagctgcttgtgaggctgaggtatgagaatcacttgaacccaggaggcagaggtagcagtgagccaagatcacgcaactgcactccagcctggggcggcaaagcgagactccatctccaaaaaaaaaaaaggaacatcattggctgtcacagaaactgaaaggacctcactttatggctgtccacaccgtccacacctcctggagtcccgagcgcggctggcgtgtcgtgtgcatttctcaggccctcgccaggtggtgaccagcgtgtcccaggagtggacgacagggtggtgtggccggggcctgtgggactcatcttccctgggcagtgctggggccgccttggctgcgtcctcgtgtggatcactgtgtttttatgtgacacggctttgagcgtcgttcacatgttcctcgtggctcattgtgtccacatcttgctccttctgaggaagcagagggtgtgccgtggcctcttgtttcacacacagatgcgccatgctgcccggcaccttctcacgggcaccccgcagaatgccagaggattcttagagaaagaaaagagctgggcacggtggctcacgcctgtaatctcagcactttgggaggccggggcaggcggatcacgaggtcaggagatcgagaccatcgtggctaacacggtgaaaccccgtctctactaaaaatagaaaaaaattagctgggcgtggtggcgggcgcctgttgtcccagctactcaggaggccgaggcaggagaatggcgtgaaccccggaggcagagcttgcagtgagccgagattgtgccactgcactccagcctgggtgacagagcgagactccatctcgaaaagaaaagaaagaaccctggagtacttgctggttgtggaggaaggccccacatctgcccgccccgttgctgtcctgttgagagcacggcctgggctcccccgagccctgcagatttcatgcaacacatctgaaaacggcaaaggccttttccacagatgtcgtgccccctttccctgcagttatctcagcagccccctttctttggggatagggcggctgctgccagttcccactagatcgcctgagcacccactggggtgtgagagccaggcctggtccctgtgtgctggggctgggtgttctgagctggcactctcacagttgttgcatacctgctgggtgccagggcaaagctggcccgtttcctacaaactggctcctttattttttttttttgtttatgtttttttgagatggagtctcactctatcgcccaggctggagtgcagtgatgcgatctcggctcactgcaacctcctcctcctgggttcacaccattctcctgcctcagcctcccgagtagctgggactacaggctcccgccaccatgccgggctaaattttttgtatttttagtagagacggggtttcaccatgttagccaggatgatctcgatctcctgaccttgtgatccacccgcctcggcctcccaaagtgctgggattacaggcgtgagccaccgcacccggccacaaactggctcctttattatgtaaagaataaagtgggctataaaacatgagaatatgcaggctgacccccaaaagcctgacacccttgaaaacccactcccccatgtctcagatggctttcatgggggcaggagaaaggatagtgaccttaagtcttctcccgtgacggtgacagctcgtttgccagctgttgctggaaccggccctggatttagaggaaggcgtggaagttcaagactcaagatacttcctggatagagaataactggaaaggctcaagtaagtttttccgaagctctcgccttaggaggagttcagcctggaataagagcgtgtgttagttttgtcatcccacctaactacagattgaattaccctgataggtttttaagccattccagtgtgcattatctcaataaagctgttatttaaaaaaaatactagattgcagttttaaaatacttaaattttacagcttctaaaaaaggaaagttatttccaaccagaaaagtaaagtagaaaatggattctttgcgcagagcatggtggcttacgcctgtaatcccagcactttggaaggcaggggcagcaggattgcttgaggccaagagttcgagaccagcctgggcaacatagagagaccctgtctctacaaaagatttaaaattacctgggcatggtcgggcaccgtggctcacgcctgtaatcctagcactttaggaggccaaggtgaacggatcacaaggtcaggagatcgagaccatcctggctaacatggtgaaacttcatctctactaaaaatacaaaaaattagcctggcgttgtggcgggcacctgtagtcccagctactcgggaggctgaggcaggagaatggcgtgaacccgggtggggcggagcttgcactgagctgagatctcgccactgcactccagcctgggcaacagagcgaaactccatctcaaaaaaaaaaaaaaattatctgggcacgctggcacacactgtagtcctagctacttgggaggctgaagtgagaggaacacttgagccagggagatggaggctgcagtgtgccctcattgcaccactgcactccagcctgggtcccagagcgaggccctgtctctgaaaaaaaaaaaaaaaattatatctgcaaagaccctatgtccaaataaggttccattcacaggtacttggagttaggacatcagcatctctctggggagcacatttgacccgcgacgctggcgttcatctctgtcttagttgtcatattaaccatttcgtttcttagctttccatttgtatttctataagataaaggtgtagtatagtatttgaatggttgtgaaaaaataaacatgccgaagcaatggatttggttttgggattccaaagttaccgtgtcgtgagtgggccacagaatgagcccccttagcccaggtggggaaagtcatttctgtgtctcctcctccctccaggaaactcccagtacagccagcagcaggccgggtaccagcagggtgccgcgcagcagcagacgtactcccagcagcagtaccccagccagcagagctaccccgggcagcagcagggctacggtaagaggcgagcacggtcctcggggccccccagcgcccacccctgcccctgccacacatgggtacgtgctcagtaccccagccagcagagctaccctgggcagcagcagggctacggtaagaggcgagcacgctcctcggggccccccagcgcccacccctgcccctgccacatgtgggtacgtgcccggtgaccctggtgctcaggcagatgtgtaataaacttattttgaatacctttaggtttccagaaaagttggaaacatccatgcacgtagacctgaaacatcttattttaacttaaacataaattcattgcccacgtggcctgtgacgggagccagtgtcccgtgtatccatcacctgcacgcctcaggcccagcttcaacctctttgacagagcaggtcaaagcctgtgggtctcagccttcactgcagcttacaatcacccaggaaacttctgaaaaataaggtgtgggctgccccaggtcttttgttggagcaagatctcagttctcaggatgagctccacacacgtggtttcttatgaggcacgtgcctgattctgctgtgcttattcagccctttacagccattactaattaaatagtataaaaattacttgaggccaggcgtggtggctcacgcctataatcccagcactttgggaggctgaggtgggcggatgacctgaggtcaggggttcaagaccagcctgaccaatatggtgaaacctcgtctctactaaaaatacaaaaattagctgggcatggtggtgggggcctatagtcccagctactcaggagatgagacaggagaattgcttgaaccaggaggtagaggtcgcagtgagccgagatcacaccactacacttcagcctaggcgatagagtgagacgactcctcaaaaaataaaaaaataaattacttgaggctcagtgtggtggctcatgtctataatcccagcactttgggaggctgaggcaggaggattgcttgagcccaggagttcgagaccagcctggatgacatagtgagaccatctctacaaaaaatacaaaaattagccaggcatggtggcacactcctgtggtcccagctacttgggaggctgaggcaggagaatcacttgagcctgggaggtggaggttgcggtgagccaagatcacgccactgcactccagcctggcttgggtgacagagtgacaccctgcctaaaaaaaaaaaaaaaaattggcctctatcagttcttgccggagcctttgacttagccttcctagagacgatgtctctgtctcacctgcctgcaggttttcagcagctcccgtggtagttcagtgacaagttacagcagccagtgtgactggggccagcgggttctggagggctgtcctgccttcaggtagcagcagttctggggtgatggagagagcccatcagccctcgccatgctggtggggggcctggggcacagtcctgggacctcacaggactggaggggctggtgagtcggttacgtggtgctctcgctgtacagagttaacgtggagccacgtgcaggtgccaggtgttctggagattgacaaaaggctgatgcattgagacgggaatttttcaaggagaagaggaagttttaaaaaaaatttttaagttaagaaaaaaaaagaaagaggtgtccgttttggccggcctcacggttcctggtgtcttctcagggtctgcccagggagccccgtcacagtaccccggctaccagcaaggccaaggccagcagtacggaagctaccgagcaccgcagacagcgccgtctgcccagcagcagcggccctacggctatgaacaggcaagctttctggatgtttccagatgtgcccatccgccgcgcctgtcgagacataatgaagatttctcttatggccatgaggaataatgagctggaactaactggcttccagggttccttccagaacgttaagtctctgagcctgtaaggttttgcagaattgcctctgtgtatacgctcacctcagtcatccagctggcttttcataccctaagctcaccgttagatctgcacgcctggttctcacattcattcactctgccagtgtttgtcacgtactgggtacgcgtccggtctctgctgagtgcttggtgtgtggccgcgacacgaaccctgcacttttagagcttatgtctcgctacagagacataaggtggtcccacagggccagactgtgctgaggacagagcggggggccccaaatggagcccgccttccagatgggggcgcaggcgaccgcatttggcccgtgtgggcaattccaggacgaagacacagcggggagtggctggcagccccaggctcagcctagggagggggaagccctttctgcccaggaacagtgagcagggctttgaaggagctgaggaaagagcagcttggaagatggaagagcgggagctctcgggacagtgaggaggccggtgtggcgggaggtgacagggacaggtgggcgtaggggcctccataaagcagacatcgctttccctctgagtgggatggggcccctggaggaggacagggtctgtgtggtgggagcactgcaggagcgagggcctcctagaggagaatgagccaggcaagggaagagggcgtgccaaggtcctgaggcaccaggaggtttgtcccagtgaaggcagcctgaaggaggctcggtggctggagcacagggcatatgaaggagaatggtctgggacattttttggagcctcctttgagagagtccttagcaggaagtggctctgtgttggtgactctgaggtggctggaggtgttagggacactttacactgccagtgaaatttcaaagcactacatcgctcaagtttgtttttctcagggaattgggtaggtaagaggccaaagactgttttttaaatgcttctcgtcctccttcttcaagagggcaaagggtcaccaggtagatgtagagaagcctaaagaccatgtaacacagtctccctgccagggcaccgtactcggccatgcctgggaagggcacgctgatgaggcatttacacagatgtcaggagggctctggtgtgctctcaggacactgtgaggccactgtagccgacgcaggggccgcctctccccagtgtgtgctgggcgctggtcagcggggagcaggccccagcttggccctccaggtttgcacaggagtgtcatgctggagtctggaaggacagcagtctgcatcctgatgttaaattagaattatatgtgaatgattctgatgagacgccatacctccttcatacagtcctgaaaataacttatttggattttgtgaaataagtgaatgtcctaacttaattataagactgaaccagaggacatataactttatacctacctatgaaaagaccgtgaccggtcgtggtggcccatgcctgtaatcccagcactttgggaggccaaggcaggaggatcactagagcccaggagtttgagaccagccagggtaacatagcaagacctgtctctacaaaaaataaagtagtcaggcatggtggtgcatgcctgtaatcccagctacttggaaggctgaggcacgaggatcccttgagcccaggaggtcgaggctgtagtgagtcgtgattgcaccattacactccagcctgggctacagagagcgagactttgtcttaaaaaaaggaaaaagaaaggccaggcgtgggggcttacacctgtaattccagcactttgggaggctgaggcgggtagatcacctgcagtcaggagttggagagcagcctggccaacatggtgaaaccccatctctgctaaaaatacaaaaattagccgggtgcctgtaagcccagctattggggaagctgaggtgggagaatcgcttgaaccgggaaggcagaggtgagttgagatcacgccactgcaccccagcctgggcgacagagagactccatctcaaaaaaaagaaaaagacacagagcaatggggaagatagagaatagaatttcacatctggggggaaatgtgtccatctaactgcaaaatattaagatagcctttagtcagcatccagtgtagctggccgtggcgctttggcacagcactgccggcgctgggcgtctcctaggggccattgtgcacactgtgttatgtttgcagcacccctggcctccaccacgatgccagtagcacccccattgcccagtctgacaatttaaaatgactccagacattgtcagatgccccaggggcaaaactgtctccgtttgagaaccactgggctacacttaaacatgtgctgaggcggccaggcgctgtggctcacgcctatagcactttggaaagcagaggcgggcgggagcagatagagacggaggttgcagtgagctgagatcgcgccattgtattccagcatgggcaacaagagcgaaactctgtctcaaaaaaaaaaaaaaggtgctgaggcattggggctgccagtggttttatagggctccagggctgccatgccttcagctgagcagctctggatttgaggctttccgtcttacccaatggtgcaggagcagaaagacatcagaacagactcccactaactagaatcatcacaggcagctctgggaatgagaatgtgacgtgttcggtcaggctggaacagctttcctccctcccccacttcctcgctgggggcattcgggaaatctgatcattaactagctggggacacatggagaacaggcatgcagatgatgatccgttgtcttcccctgtggcagtctcccgagtggctttcaccacaggtccgatgctccgttttgctgcccaaggaattctgccttgtggccttgtggggcacaggctctctagtttctcttcttcatgttgttttttgttgttgtttttgagatggagtcttgctctgttgcccaggctggagtgcagtggcacgatctcgctcactgcagcctctgcctctcgggttctagcaattctcctgcctcagcatccggagtagctgggattacaagcacgtactatcacacctggctaatttttgtatttttagtagagacagggtttcgccatgttggccagggtggtctcgagctcctgacctcaggtgatccttccaaagtgctgggactgtaatcctacaggcatgagccactgtgcctggcctttttttttttttttttttttaagacagggtctcactctgtcgcccaggctggagtgcattggcaggaacatggctcaccgcagcctcaacctccggggcatgcgccacaacatgtggcttattctttttttttttttttttttttttgagacaaggtctcactctgtcacccacactggaatacagtggcatgatctcggttcactgcaacctccacctctcaggcccagtgattctcctgcctcagcctcccaagtagctgggattacaggcacgtgccactaccacctggctaatttttttttttgtatttttagtagagatggggtttcaccatgttggccaggctggtcttgaactcctgacctcaaatgatccacccacctcggcctcccaaagtgctgggattgcaggcgtgagccactgtgcctggccgaggctaattttttctctttttttgtagagatggggtcttgctgtactgcccaggctggtctcaaactcctgggctcaagcagtcctcctgcctcggcctcccaaattcagatttgtttttgaaacagggtctcacccagactagagtgcagtggtgcaatcacggctcactgcagccttgacctcctgggctcaagcgatcctcccacctcaccctccaagtatctgggactattggcacacgccaccacacccagctaatatttggatttttgtagagatggagtctggccatgttgcccagcctgggtctttagatttttttttatagattgaaacccatcaccctggtcgtccccgctcccattttcttactgtagcaggctcgggggcagatggtgtttgcattggctcccagtggggccagcttggaggagagccttcctgcatagcaggcccagcataaggctctgatgccaggcctggcacaggcccggccgcagcgatgccagtgtgtgactgaacaaatgaacctttggccctgtctacgttgttagccccaggcttggccagtggcttctggaaagtcgttcgctgccccgcagagatgtgagcagaggttgtttgcttgctgttgtccctcctaccccctgtccgggctggggtggacgtctgtcttcctttcactcattactataggggtgtaatctgtgtcttgatctcttttagggccagtatggaaattaccagcagtaagggacacacattctggctggagcccttgtggtagcgtgttcatccaggggccggatgggctggcggcagctctggtgaattgtgacatgttggttacctgttcgcccagtgccacgtctgcatgtgaagcgtgctcatttcatgctgggtatgacgccgagcgcacaccactggcgtgagacagcgcttggtggtgtgatacttttggtgctgtgtatagtattgtatgtcggtacacggagaggtatcctttttttgtcccccgcccccttctcaatgtttctagctagctttgggggtcattttgtcatcagagcattctgtgcccagggacaggacagatctcgaggacaccacagtccacctgttcccgtcaacagacgttaggtctcattttcctcctcatgcagtgttgtagtgtgggttgtcaacttttctttaactggctacgccacagctggacacacatgcagcccctggagggcagcctcttcctgtgcctcgatggggtgggtgggagggcatcttctgtgcgttgggtcagtttctgttacgtaacgaaaaggataaacatctcccacgggagaggccacagatggccacttccagagcttgcccattgcctgtctctcgccaattccgtttatccaaaaaggtacatgtttttgtattaaaaagtaaacagggatcagtgactgtattccaaataaatatgaatccctaagggccgtggacaaattgcctaacccagggccagcggtattgctgaaggaaaggggcagctctctgggaagtgggccctcagagattactctggctttgacccttgtttagctgatggtcatttctgggattggaatatttaataagcccaattctaagttgataggtaattttaaatattcaaaccaaatcttcccaacagttggcaagttgtttattttatattatttcttccaggacctacttgctcagatctccaagcaagcatttcttttcttttagggatgtctgaaagtcacatccagttacattactgtgttctttctaatgaaaagtaaaggttttatatagagaaacttgagtaatttttacatttctaagacattaaatcccatttaaattctgtgtgaacattaaagacagcacacttgcaaaagtatggtcaaaggaaaaaaatcccacatttcaattaacaagtagcatggacatttgatcaacctttagttggaataataatattcatatttgctatgaatccttttaaaaaaatctttggataaatgctgacagatttccaagaactaccaagaaaatacaagagatatccaatgcttgatatatgaggcctagtaataacgatatttctctttaattgatgttttgttttaaaagttaaaagtaattcttggcgtggtggttcacgcctgtaatcccagcactttgggaggccgaagcgggcggatcacctgaggtcgggagttcgagaccagcctgaccaacatggagaaaccccgtccctactaaaaatacaaaattagccaggtatggtggtgcatacctgtaatcccagctactcgggaacctgaggcaggagaatggcttgaacccaggagacagaggttgtggtggggcaagatcgcaccattgcacccgagcctaggcaacaagagtgaaattccgtctcaaaaaaataaataaataaataaataaataagttaaaattaattctttatccagagtcgggtgctttagaatttataagtcacttatgtgttttgcttgaattaattctgacagcccctatgaggaaatctggaggcaggtaacagttcccattttagagatgaagaactgaggcacagattaaaggacttgcctgtgttgaataccagtcctgttctaggacattctcccctctcctaggagacggatgtcacgcacaaatggggagagaagtgtttattttgtaggcactaagggtttctaaaacccttaacactggtaagggctcaaaaataaacgtatgtgttcatattcgatcaccgaaatgagagttcttaattgctaattgacaaacgcgttagcaatttcagttagggagtcatctcccttgattgtgttcttttcctgtcaattttcatagacctaatttgcaaactcaatcggggactaaaatttcccactgaaaatgttaaacattttagataactgtgaagatagtttatttttattccttgccaatctgggaatatgccttttttgtgtgtttgtgtgtttttttaagtgctgtattaataatactttctgaaagaaaaggacacttaccccaaaacttcaatctgaaatgtcttacattaagaatatcttgaatgttgtgtatatattttaaaaagcactttgcaaaatagtttgtacatttatttcctaatttatacatgatttttggtgttaatatatttaatgattaataacagaatgtttatttaatgtgctgtccatttttatgtaatattatggggaaagtgatgccagcagttccttttcattattctatcttctgtcatatgaatgttgagcaaagcttaggccaacatgaattgtttgtgaagtgtggttgatggtgctttgtttttttctgactacttctatggaaggccagtgaagaagcaaaggaagacatgaaaattgacgctcattcttcttcctattgttccctgacatccagcaaattgtgaatttgaaaaatgatggccagttttcagaagtgctgacaaattcatattggtatgcaaaagctcatcacccattaaggtttgttgttgaatcaacagtactcagcatattaaaacagtacatcagaactcatgccaacagtctttatgatgggattaaggtggacaagatctcctaagatctgtgaatgggattaaggtggacaagatctcctaagatctgaaaagaaaccttaatacgctcatatggttggagtgttaagtgaacctctgattttgtcagggtttttctacgtgtaggcgtgaatagggggcaccccttcaaaactgtacaaagaagacgactgttttccatttccatttaaacatttttagccacttcatttctatttattgaacaggtcaaatttgtcttgttatttgtgagtacagtacatttaaaaaacatccttatcggttatttttttttcagtcggagtttgacgtataaattgtttatgcttttggtgtaatctcttaataaactggttcttcaaaaatcatcctataaagtgagttttcatgaagttaacgggattttggtgtgatgtgttttgcaaatacttattaccgagaccaggtagatcgtcacctcggctcccgggcagagttcgcgtgcgtccgcaccggattccccgcggcggcaaggcgaagccagggtaagggcggtggggacggcgccccggggctgccctgcggtccccactgcctgctctgcgttgccccgtagcctcctcgggcaacggcggtgtcctcgtcagacccgggaggttccgcaaacgccggaggggtcagagaagctgggggaccttgggcaccgggtggaacgggcggggcggctgtccttgtgctcgggcagcgagggcgccggcgagaagcgcggctgcagctgagcgctccgcatccctcctgccgttgctcctgcttccgctaccagggacaaggtcgcctctcggtccgtcggcgtgttttctgcacctgcgcactgggcaagccttgggcttccggagccaaaaggccccggaagtggtcggccgcttgcgacgctccggaagtgacgtgctttcccgagccggtgagtgcgggagcggggagcggggagcgtgggcctggggggtggtcgcggcccgggcgcaaggaggggcctcggcttgggccgcggggtaccggggcgctgggagcgggagaggccccggcctaggagctgagaggcctggagggctgccgggctgcgaaccccggcgggaccgagcgctgcggccctggagtagcgagcgctcgggcggtggggagcggcgccttgctccccggtcctgccccactctctccgcagaaccgcgttttggggtcagaagtcttgtcagccaccccggtggtgctctgtcacgggatgggtgccgtgtgtgagttccgagtcaagttgttaggaatttgccttgatccagcgctctaagtattaaacattttaaagtgattattggcagtatacagttgcacaaaacaacataaatatatacacatttggatgataaaacaacaataaagttttgtattgtaaacgcgcctcagggagacgcatttccagataattcactgtccgtggctggcttctgcccagtgagagcgggttacccgttctattcccatttacgttctcgtagctgtggataccgaggaacggcgttcacacagacctgtaggtgggaattagaggggttgttgggcagtgtcactagagaaatacctttcttttgtaaaggggaggacccattataaaagggggacgggaaaggagaattcaaattgttttaaacgcaggttcgtcctcaggcagttctgttttagcagagagaacgtagcgaaacttgggcagaaaatggattcctttgaaattatcctggccttagtcccttgggaagtctgtgtaggcgaacctcagtgagaagattcctgccgtaaaatgcaggtgtcagcagcatgccagggaggccagaggatactatgtgactttgggcaagtgactgaacctctgtgagtctcagcctccactgctttagatgggcataaaaaatgtaaagtcaagaatcaggtttccgctgggcgcggtggctcacgcctgtaatcccagaactttgggaggccaaggcgggcagatcacgaggtcaggagttaaagaccagcctggccaacatggtgaaaccccatctctactaaaaatacaaaaaagtagccgggcgtggtggcaggcgcctgtaatcccagctactggggaggctgaggcaggagaatcgcttgaacctgggaggtggaggttgcagtgagccgagaccgcaccactctgctccagcctaggcaacagagcgagactctgtctcaaaaacatacccaaaaaaaaaaaatcaggtttcatgctcacaggaggatttgaggagggtttataaagggaccgtttgcaaaggcagagtgcaggttaatgacagttggtcctttagcctggaactggtggcagtggagtttctactcctggactccaaaggatcagggaaggcagcagtgatcgggacagggagaagagtcactggggagggcttcttggactggaggtgtgagcctcagtctgagtgggcagggaggtccatgtcccggcctcctgctcctgcctccagtctctggtagagggccaggtcccagtaggttttcctatggggcaagctcaggctcctgacacacagcacagggcagggtggaaagctggtctggaaaagcaaatggaagatagctcggcatgcagtattacccctcgcagggtattatcgttaggaatacatttaaaagtggatatattggttgggtgtggtggctcgcgcctgtaatcccagcactttggggggccgaggcaggtggatttcctgaagtcgggagttcaagaccagcctggccaacacggtgaaaccccgtctctattaaaaatacaaaaatgagctgggtgtggtggtgggtgcatgtaatcccaggtactcgggaggctgaggcgagtggatcacttgaacccatgaggcggaggttacagtgagccaagatcccaccattgctctccaacctgggctacaagagtgaaactctgcctcaaataaaaaagaaaaaaaatggccagggcgtggtggctgatgcttgtaatcccagcaatttgggaggctgaggtgggcggatcacgagatcaggagttcaagaccagcctggccaacatggtgaaaccctgtctctactaaaaatacaaaaattagctgggcgtggtggcatgcagctgtaatcccagctactcgggaggttgaggcaggagaatcccttgaacccgggaggcagaggttgcagtgagctgagatcatgccactgcactccagcctgggcgacagagcgagactgtctccaaaaaaaataaaaataaaaaataaaaaataaaatatatacacatacatatatatacatgtatatgtatgtacacaaattagctgagcgtggtgatgggtgcctgtaatcccagcttcttggaacgctgaagcacaagaattgcttgaacccaggaggcgaaggttgcagtgaggtgagatcatgctattgcactccagcctgggagtgagacagagtgagactcttgtctcaaaaaaaaacctttctgtgatgagggcagtgttctaatatgtgctgtcccatatgtacccactcgtgacatgtggctgtgtgcacttagatgttacctcagggactgagtttttacatttcagttaattttagccaaatggccacatttggccagtggggactgtgctggacaggtcaaggacagccttgttggaaggaaaataaagacaccaaagagcagcgtgaaaacagtgggatttgttcatccggcaggggagagagcacagcactcagcgggcctccaaagagaaattgaaagggcaaaaaggaggaagcaaattaggcaagactccgagttcaggtctctggttggctttgcaaccttctctgcggttgatctgcaggttccatgtcacctgcatcaggaagcctggtttccagaatatccgggctggatggtgtaacgttccagcaggctgagccgtggctatgcttgtgttgatgagcccgagttgtttttccccaacctgtttttatgcaccacccctgagccttcccatctgatagctctgggttaagtctcttcacctgtctgcccagtttccgcaactttaaaatgaggatgatgaaggacttacttcacagagttttatgaggactgaatgagttaatccctgaaaaatacttagaacagtattttgcaagtagtgaggtagaggtcttgaaggtttactgtgaaattattttcaggtactttttgtatttggcactaccataaatggggttttttcttaattttaatttacagttgtttgcggctggtatttaagaatacaactgatttttttatattagcctgataacatgccatcttgctcagttcccttccctgggacttttttttttgttttttttttttttttttgagatggagtcttgctctgtcacccaggctggagtgcggtaacgtgatctcggctcacggcagcgtctgcctcccaggttcaagcgattctcctgcctcagcctcccgagtagccgggactacaggcacgtgccaccacgcctggctaatttttatatttttagtagagatggggtttcaccatgttggccacgctggtcttgaactcctgatctcaaatgatccgcccacctcggcctcccaaagtgctgggattacaggcatgagccaccgtgcccagccttccctgggattctctgtggaactctgtcctctcttctgtaaacagggacagttttacttcttccttttttccccctttatttcagtgtgtgaaaggacattgttgcatagcagtggtatgtgtggaggccctttttctccatcttgggaggtaaccattcagtatttcttcattaaatgtgattagctgtcggccggccctacgtagtgcccttatcagggcgaagatgttcccgtctgttcccagtttgctgagatgttttgttttcctcctcatgagtgggtgttgagacggtggtaccacctgttgatatagtgaagtgcctgggctgagttttgactgcttgatgtggccttgtgttctgagattacccctactaggtcttgatgtgtgatcctttctgaactgctggattcaattgggtaatattttgttaagagttatttgcatctatattcatgaggggtatggtctataattttattttttcttagtgtcagattttggtactagcctcataggatgagttggatagtgatctcacttcctctattttctgaaaaagcttgtgtaagattggcactgtttcttcctggaatgttacatggaatttaccaggaaaacaagccgagctagagttttcctttggggagtgttcttttataagaaatttaacttattgagtagatacagggctattctagattgtttattcttgtgtttctttaataagttgcctttttcaagaaatttgtccatttcatgtaagttgaatttgttactgaatttgctggcatgaagtcgttcccagcattctcttgccctctggctgtctgtaaggtgtgtcctgataacccgttgaacattcctgacagtggaggtttgcgctctctcgttttcctgatcaggctagaagtgtgttagttagcttgtcttttcagtgaacctgtttttttctgttacatgttattgttgtctctttatttctgctctgtattattctcctccttctactcgacgcttactttgctctttctggtttcttgatttggagccttaggttactgattttagatctttcttctttaccaaggtagccattagagctgtaagtttccttctaaacactactctagctgcatctcttaaattctggtatttcatggtggcgggcgcctgtagtcccagctactcgggaggctgaggcaggagaatggcgtgaacccgggaggcagaactttcagtgggccgagatcacaccactgcactccagcctgggcgacagtgcgagactgtctcaaaaaaaaaaaaaaaaaattctggtattttgcatttccattataattcagttcaaaacattttgtaatttctcttttgatttcttctttggcctatggattatttagaagaagcttgtttgatttgcaggtatttgggattttcctagatattttctagctattgacttccaatttaattccgagaatagaccctgtggttggtattcatatacttccccccagccccaccacagaagctctgtcacacaggctggagtgcagtgtgtgatcatggttcactgcagcctccaactcctgggcttaagtgatcctcccaccttagcctcctaagtagctggtattataggcatgcaccaccatgtccagctaatcagctaattttttttttttttttttttttttggtagacacaaggtctcgctattttgcccaggctgttctcaaattcctggcctcaagtttttctcctgccttggcctctcaaactgctgggattacaggtgtgagccactgtaccgggcctttctgtatacttcaagtaatctctagattatttatagtacaatacaatgtaaatgctatgtaaatagctgttatactttattttttaaattaaaaaaattgttgtattgttactggtttttttgtttgttttccagatatttttgacgtgaggtttgttgaccccacagatacggaggactgactatgatttcttctcaatgtattgagacttatgacacatcttatggtctgtttgatgacttccacctgtacctgaaaacagtgtatattgtacagttgttggatgtactgttatgtaaatgtcaactagataaatgttttgatagtattgttcagattttatgtctttactgtttttatttttctatttttagacagggtctcaggccaggtgtggtggctcatgcttgtaatctcagcactttgggaggccaagacagaaggatcgcttgagaccagcctgggtaactgggagaccctgtctctgcaaaaaaaatttaaaaattaggcacagtggcacttacctgtagccccagctactcaggaggctgaggcaggaggatctcttaagtacaggaagtcaaggctgtaatgagctgtgattatgtcactgtgctccagcttgggtgacagagtgagactctgtctcaaaaaaaaaaaagaaaaaaaagtgtctctttctctcattctattgctcaggctggagtgcggtggcatattcatagctcatagcagctttgaattcatgggctcaagtgattctcccacctcagcctccaaagtagctgggactataggggtgcgccaccatgcccagctaattcctttggtagagacaggagtcttgctattttgccgaggctggtctcgaactcatggcttcaagagatcttcccgccttggcctcctacagtgctgggattacagccaggaactgctgtgcccagctagctctttttaatccactttgtcaacctctgccttttaattagaatttgtaaacattaactttttttttttttttttttgagatggagtctcgctctgtcttccaggctggagtgcaatgatgcaatctcggctcactgcaacctccgcctccccgttcaagcaattctcctgcctcagcctcctgagtagctgggattacaggcacacgccaccatgcccagctaatttttgtatttttagtagagacggggtttcaccacgttggtcaggctggtctcaaactcctgacctcgtggtccgcccgcttcagcctcccaaagtgctgggattacaggcatgagccaccgcgcccagccaacattaacatttaatgaaattatttatatggttagatttaggtgcacttttattatttgtttcctatttgtcccctctgttttttgtttgtttgttctttttctttggaattgttgggctagttctgagcatttcatttatctgttggcttttcggatctgtgtctttgtgttgtgtcttagtcattgctctggaggttccagtctgcacacctgttagccttcactgtctgctcagagttcatactgtgcccctcacagaaacgtggggaccttgcagtcatctgggtccctcgaatcccctcctgacctttctgttgcctttcatgtggattacttctgtgcgcgttggaagccaactacgcagtatttttttgtctacagtcttacatatttaagaactcctaagaggaaaacaatagtattttatatttaccaattctgttgctctcccttccctcctcaagatccaggcttccctctggtatcattttccttcaacccgaggaactttcttgagcattccttatacagcagctgtattagtgacaaactatgttcgttttctgccatctagaatctttattgcaccttcgtttctgaaagatattttccctgcgtatagaatacctcggtgcctcttttctgacaacacttaaaaatatccctacataatggttaaaagcagggtggatcctggcctagatcctggaccagaagaaggacgctcttgggaaactgctgagccccaagccccacctggagctcagttagtagcggtgcagcggcggcggccgcacaggcacggctgcgggggcactggggaggaagtccgcagggatgcctttgcaccttgtccacaaatctaaaaccatctcaaaatcagctgtcctgtaaaatatatttacaggaagggtatcaaggggagggtgtcccatggagaggtggcccggcacgggaactcagccagtcggagaacagagacccgctaaagaatggggagctctgggagcaggcggggaggtggagctgagggcgggtcacagcaggtaggggttgagcagctccataaatatcttaaagtgcatggaggcccggtttcttataggcggagaatggagttaccaagaccacaagagaaaattagaatgaccccagagtgctgaattgggaatgaggacgtcctgtgcacagctggcctgctgcctcccacgtgtcagggctggctcgggagtcaggagaggctgaggaaccttccagcccaaggagctggacaaggtgtggcagctgcaggcagccgggatagggacgcagactttcctacagggagaggcactgctgagaccggggcccacgtgggaggggctgtcggtcatggccagtctcaatgacaccctggttctggaggggacaccattttctctaggaaacacacatggactgttctgggtgcagggaagtccagtcggcgactgactcttaagtgattcaggaggaagttctttgtactcttcttccagcttttctgtaactgtgattgcctcagaattaaagcagaatggccaaggaccccacagagatagtgacccccccaaaggaggtggcaccttttcagaggagtgaggctggggagagggaggcgtccgaggcactgcgagggaggaggcaggcggtgtcccctcgttgtgctcccgctctggccccgtgttgagttttcagccgtccactggggccccttctgtacacatcttttgtagtcaggatggggagcaccttgtaaggtccctcctgtgcgacctgctgaagactggggagctctgggagcaggcaggtatttgtgctcatggtgaagggagaggggctgtcctctcctggagggcagggtcaggacttcctcactgtgcccttggcacctgcaaggtagccggctgtcatgagcggcttgttgaatgagtgacagcttaaatgaggctttgagagtgacagtagctggcacttagagtctgcagctgtgccaaccctgtcgctccggggatatttccacccacactacacatcaggcaccaaatgtgtgggttttccacaccaacaattcgccagtcctctgcagacaccagccaggcatcctgtaattcagttcagtctgaccctgccgcggttatcagggaccccagcgttaggggctcagtcaccccccacttcagatgctaattgcaagtagtgggtccctggggtacccacacttctgtccatcttggctacacattgggagttcctacgaccccttcaggtttgatgatttgcggtagtggctcacagaactcaggaaggcacttggtttgcattgccagtttactataaaggatgccacagcgggcacaggcaggcagctgggtgaggaggggcacgggcgaggcccagagggtcctaagcataggagcctttgtccccagggagttgtgtggctggccttacagcacggggatgagttcaccaaactgaaagctttccagagcccctagttccaggatttccatggaggcctcatcatggagacatgatcagttatgaactcagcctccagcccctctgccctttttggagggtgggggtggggccgaaaggtccaggcttctcatcgtggcttggtctttatgatgaccagccccctcccaaggccatccaggagcccaccaagaggtgcctcattagaacagaagactctcctgtcacctgggaagtccaagggatttaggagctctgtgtcaggcacccctatcgcccctgtcactcaggaaattaccagcgttctgagagctctgtgtcaggagccaggagcaggggccaagtgtgttcttctcattctatcggtgccacagccagggccgcggttgtgcagccgtgtggatcagctcagcccgtcctcacccagccgtgtgaggaggccgaggccacacaggtggatggccttcccttagagttactttccagagcctgggtgcttagccgctatgccccatgtttaatattcttgtgttccaatgtaacaactttaaaattacacaggataacactcttgataacattttaataaatgggtgtttttcttttcaagaaattttgacttgcacttcagatttcctttttaatattttcgttgagcggaaccttgctattccataagaggatgtgtccagtgttgtggaagatttcatgttttaaatcctttgtacagaaatcctgctcccaagtcacagataggctgacgggtcagagggcaagacgtgacccagggccgagagggtgagtgaccaggaaaatcggattcatcagttcacttgtttgtttcagaaacgtgcacaaagacctgctgcatgaggccctcgtcttcagtttctgtttcatgcccagcattaaaccaagtatctcattttgccaatttgacttctgtaggggccatggcacctgcaaggtgtttctcagcaagattgaggaccgtgtttcagggcgtggggcattgggctttgtccacatgggctggcctgaagcccagccggctactgccacagcgggcttctcccaggctgctctcggtcggccgtgcggacctcgccaagcatcaggaactcccggggaagaagctgctctctgagaaaaagctggtgagactcctggagttagagcagcttgcctgtctcctcctcagaaggcacagggtgtggtttcgggtcctcctctgggtctcatctctgttgatgttagttgatgatcttagtgatggggcacgtggagcttcttgaaaatgacagggtgaaacgcaggcctgcgtgctaaatcccacgctcagcaaatcccagcaggctgggagaggcgctgcgtgcttggaaagccgtgatacaggctgctcattttcccatgagcctgtgtattttacatgtatgttacatatatcctttcatatgtgtggctatttcttaatttaaaacaaatgcggaggctgggcacggtggctcatgcctgttatcccaacactttgggaggctaaggcaggcggatcacttgaggtcaggagttcgagaccagcctggccaacatggtgaaaccctgtctctactaaaaaaaaaaaaaaaacctttttaaattaataaataaataaaaataaaacaagtaggggggaatataccttccgttttatggttctttaagccttataagtttttcttgttctatttaccaaaacctcctatttaaagcatgaattgtctctaataaattcaagaaaatgcacgtttatgactcccttcgtttcctgctgaatggaggggctccagataagcattactgggacaaacagcacttccagtggaaaagccgctttggtgggatgtgtgctcaaatagctgaagcgttagcacaggcttgtctcctccccaggagagaaagtgagtcgaggttttgtcctccacgaagtgctcaccagtggggctttcctccctgtctggtggattttgcttgcgttggcgcatgacagcattacacattgaaatttggaaataacagttcgtggttttcccacatggtggtgccaaagaatcttagaatgtttgtgttttaaatttttaaatttttttttgtgtttaaatttttgtgtttaaaaattttaaatgttttaaaattttcttttaaaagaaaaaaaaactgcatttgaggagtattggatcggagtgcagaggcagcagccctgggtggctgtcaggggcagggcacgtctgtctgtgcacgtgggcagaagccaggtgtcctccccagcgtgtggtgaggttgcagcaccctgggctgcgggagctgaccctcctgtggtaggagctgttgtgtgttgaacagtaacctggttggttctctctcttcatccagattgcacctaccttagtgacctacagaacagctttcctagccgggcacagtggctcacgcctgtagtcccagcactttgggaggccgaggcgggtggatcacgaggtcaggagatcgagaccatcctggccaacacggtgaaaccccgtctctactaaaaatacaaaaaactagccgggcgcagtggcgggtgcctgtagtcccagctacttaggaggctgaggcaggagaatggcatgaacctgggaggcagagcttgcagtgagccgagatcccaccgttgcactccagcctgggcgacagagcgagactctgcctcaaaaaaaaccacaaaaaacaaaacagctttccctccagcgaggggctctgtttgcctcaccacattttttaaatgagccctgttttcatcaggccccagaaaatactctttcttcagagtcgaaagcctggtaattgtccaggaacgattctaacttcctatttctctatcgcatcctgggaaactagaactttctaagagtaaagatctatgatttcaggaatggtttttttgaatggaaagacacattatataaggaatatttcctaaacaagatgtgggttttttagcttagaaatgctgatttttgttgttggtttttaaatcagtctcacccagagtaagaaatgctgaatttttgaagtgtaggtccacacagaatacttacatctgcattgtggatttacctcagtctacaaatgcaactgacttgtggagactgttttttatcttcggaatttagaagtgattagcaatattagtgtcattaacctctaattttaataggctgttatagatagaagatgtacatctcaaatggatgcatggtgtcttgaaaggaccttggagtgttgagatgacgtgggatatttgtgttctctgtagaaaaggtactttgtggactatcggagagtgcttgtctgtggaggaaacggaggcgctggggcaagctgcttccacagtgagccccgcaaggagtttggaggccctgatggaggggacggaggcaacggtggacacgtcattctgagaggcaggtgccctggggcagtgcagcggggttgaggaggggccccgagactgcatgtgcatttgaactaaaaacctgatgtatgggcaggcacagtggcttatgcctgtgatcccagcacttggagaggctgaggcaggaggatcacttgagcccataagttcaagaccagcctggacaatatagcaagaccatgtcttttttgtttgtttgtttttttgtttttttttttttgcctcaaggtttgtggatctacaaaaaatttttgaaaaaattagccagacatggtagcgtgcacctgtggtcccagctactcaggaggattgctggatcccagaagttcaaggctgcagtgaatcgtgatcacaccactgcatattccagcatgggtgacagagcaataccctatctctaaaaaaaaaaaaagtaaaatttttaaaacccagctaggcgcagtggctcatgcctgtaatcccagaactttgggagaccgaggcgggtggatcgcttgaggtccggagttcgagaccagcctggccaacgtggtgaaatcctgtctcttaaaaaataataataataaccagatgtggtggcacacactgatagtcccagctacttggggctgaagcaggaggatggcttgagcccaggaggtcgaggttgcagtgagctccgattgtgctgctgcactccagcctggccaacagaggaagaccctatctcaaaaaaacaaaacaaaacaaacaaacaaaaaaaaccctgatgtatggatatcatttttataaattatatggatattcagccgggcgtggtggctcacacctgtaatcccagcactttgggagaccgaggcgggtggatcgcttaaggtcaggagttcgagaccagcctggccaacatggtgaaaccccgtctctacaaaaaatacaaaaaaaattagctgggcgtggtggtgggcacttgtaatcccagctactagggaggctgaggcaggagaattgcttgaatccaggaggcagaggttgcggtgagctgagatcgtgccattgcactctagcctcggcaacaagagtgaaactccgtctcaaaaaaataaaaacataaaacataaaaaaaaaattatatggatattcatagttaagtagcacacccaaaaaagcaactttgaggccaggcgcagtggctcatgcctataattccagcactttgggaggccaaggcgagtggatcacctgaggtcaggagttcaagaccagcctggccaatatggagaaaccccatctctactaaaaatagaaaaattagccaggcgtggtggcagatgcctgtaatcccagctatttgggaggctgaggcacgagaattgcttgagcccaggacacagatgttgcagtgagccaagatcatgccactgcactcctgcctggctgacagagcgagactctgtctaaaaaaaaaaagaaaaagcaactttgaacatgttttgttttgtttgtttaatttcaggagcacagagagtttcctgtcagggaagctgacatgtcggtcgcgtgaaagcacgaggcctgtgtggtgggttcggtgggtgccgctggctgctggttatattcacactcagcatagacgcatagcgagctgggagtgaagccttcacaacaaaagcatagaatacagctactgtaaaaaataagaaatttaaaaattttcagaaatgatagcactttttgaaggaaaataaggatttcatttttaaaaaatcactttgctggttttgtaacttctgctgcaccctcactccatgcttccatacctatttttaaggttcttaaactggacccagacacatcagcaataggccatggttgtcgtaacacaaagggactgagattcttgttcttgctttagttgaccagcaagtcaagtccctgtcgtcggtcctgtcgcggtaccagggtttcagtggagaagatggagggagtaaaaactgcttcgggcgcagtggcgccgtcctctacatccgggtgagccgagactgccggacctggccctgtccccgttgttctggatcatccagctcctgggggccaccgtgtgacccacggggcccctgtggcttgatgcccacagctaggaaacagcacaatggaaacggaggctggcagacagcgggaaagcagccccacccctcaaagcaaacccagacgggcatttgtaccagggtctcacaccatgtgcatgtctagtgaaaaagtcatgaaacgattctcttttaaaaagagggagcccacggcacggacgcttcctccgtctctgaccccatgagccgacctctgactgagggaggccactggcacccagcgggcctgcgtctccttcgcgagctgaattcactcgtctcttagatgttttttctggtgcttcagttcacactaacgttttagaaacactatttgaaaaagccctttgtgcagtcagaagggtgtgtacgcagccccgtgaaagccctggagcactgggaccttttccttgtgctccggagctgttggcagaggtgagtggggcgggcagctgcccggggcacagtccgctcttgtcttctttccttagcgcttgcttcaggaatgggttaaggcctcctttcctcactgctggtagagctcagctgatgagtgcctgctgttccccaggtccccgtgggcacgctggtgaaggagggaggcagagttgtggccgacctgtcttgcgtgggagatgagtacattgccgcgctgggcggggcaggagggaaaggcaaccgcttcttcctggccaacaacaaccgtgcccctgtgacctgtacccctggacagccaggacagcagcgagttctccacctggagctcaagacggtggcccacgccggaatggtaggtgtccccactgccaacagcatctgcacacactcagctctagaaaatccacttttctcaatggggatttgccagtggcctggaagagaacagctttgcgactcacctttttcccatcagtacactgctgacttggtcgtgagcatgagcccttgtgactcccccagccctgaaatcctccctccaatcccagttagttacagactctgcgctaacaaaggtgctgccgcgggccgtgccaccgtcttccctctttcccccaggtgggattccccaacgccgggaagtcctcactgctccgggccatttcaaacgccagacccgccgtggcttcctacccgttcaccaccctgaagccccacgtcgggatcgtccactacgaaggccacctacaaatagcaggtagaacttccagaattctcccaaaggttagatttaaatgatgtaattcagaaaagtaatgatgtaactcttaaatttagctttctgtttaaaatgtagcattgttggccaggcgtggtggctcacacctgtaaccccagcactttgggaggccgaggcaggcggatcacgaggtcaggagatcgacaccatcctggctaacatggtgaaaccccgtctctactaaaaatacaaaaaaattagctgggtgtggtggcgggcacctgtagtcccagctacttgggaggctgaggatggagaatggcatgaacccagaaggcaaagcttgcagtgagccgagatcatgccactgcactccagcctgggcgacagagcgaaactccatctcaaaaaaaaaaaaaaaaaagtagcattgtttttcctaatgtaaacaacttttttttttttttttttttgagacggagtctcactctgtcaccctggctggagtgcagtggtgcgatctcagctcactgcaacctccacctcccatatttaagtgattctcctgcctcagcctcccaagtagctgggattacaggcgtgcgccaccacgcccagttaatttttttgtatttttagtagagacggggtttcaccatgttggccaggctggtctcgaactcctgatctcaagtgatctgccccccgccccaccttggtctcccaaagtgttgggattacaggcgtgagctactgcacctggccctaatttaaacaattttcatcagcctgttctctatgaaaatcaggttcccaccccatcccctaggaatctgtcagttacagttcagaaacctgcattgaaattccagccgaggacagtatttcttcccactctatttgtcccctctcatctgtggaagctcagcagcatcacaacacgtgacttaaaagctttccttgtgccgtttgagagaataaaactttttcccagaagacaatacacccattaaaaatagtaagcctgctggtaaggttatttggatggcactttatatctgcagagtactctacatgtaaatttctatcagtaatcaaatgattagtagagtacaggcagccattttcctcttttttgaatcctattagaagcagaaagagaaggtatgaaatgtactctactagatagatccatcgccacgctggtctcccaaacatctccaagcattgaattcctcaggtgtcagttggcccagtgaatcacccaggtgctaaatcaaatggcttcagttcaaggcgttccttgaaaggaaagtgttagaactcaggaaatccgccttcgcagtgggctccaggccttctctcccaggctcgaggtggaaggcgctcttgggtgctgggtgtgccaagtggtcacctcgtgtgcccctgtcttccctgcagtggccgacatccccggcatcatacgaggcgcccaccagaacaggggtctggggtccgccttcctcaggcacatcgagcgctgccgctttctcttgttcgtggtggatctttctcagcctgagccgtggactcaagttgacgatttaaaatatgaactggagatgtatgaaaagggcctgtctgcgaggccccacgcaatcgtcgcaaacaagattgacctccctgaagcccaagccaatctgtcccagctccgggatcacttgggacaggaggtcatcgtgctgtcggcgttgaccggcgagaacctggagcagctgctgttgcacctgaaggtgctgtatgacgcctacgcggaggccgagctgggccagggccgccagccgctcaggtggtagccacgccagagcggggtcgcctctgggcctctgtctgagcaaacctgggtgtgaattcggtggttttgaatgcataaagtgccttgtggacacgggggagttgtggtgcttctgggtctctgggccccgcctgctggcctgagatgccctcatgttgggaagcattccgtgccccctaccccgcctgccctccgtatttcctgcacctgtcagcctgcaccgactgatgagccagttgctcatttgtgctgattaacacccctaataaggggttggggtgcccataacggggtggccctgccgctgactcaggtctccgccatgcacgcgtggactctcggatgagctcagcagaaccgcacagccagagccccaggtcagaagtgcagaccagggttctcagcacagtgcccgtcgtgcttccatggcttgctacggagagagacctctggatccacactggggctgcgtctggcccgttgtccagcagccctgcggtaccgcaagcccaggcaccagtgtctcggggggcctcactgctgcgcaaggggtggggccgaggatgcaagtccaggcagagcggcgcaggcagctgtgagcttttctccatcagccgtctgagaagagcagtgaggccagctgcttcctgtccttcagaacacttctctgtgctcagtgggagccaggaagcctcaggcttcacgactgaatgcacccaatatccgacctggctgcgtgtttctggctgggctgccgtgtgcacagcaagttaactagaggggctgtgggccatggaactgtcagcgttattctcagaaggcggccgtggcatgggcagggtatagtgaggagtggaaggagacgtgtgcctggtaatatggggcggaatttccactcagctccatttgctggggatttaaagagaacccttgtgctacgccaggcagttaccgagccgaagggagatgatgggccttcgcccctcagtgggatggcagctgagggggccctgcatttgaccgtcgagactgcagcagcgcctttcctgtctgtggtttaagtctttgcagtcaagtactgatgcatccaagccaggcccatgcctggtgtctccctgactgcagaggagccccagggcaaggacagctcagctgctggcagcctgcctggcccatagacatcccccaagtagtctcaggcctctgacatgtccctgaggggcccctaagaaagaaagtggaggggacactccagaggctgtcgtgggaggatcatgtgagcctgggaggtcaaggctgcagtgagccgtgattgcaccactgcactccagcctgagtgacagagcgagaccctgtctcaaaaaacaaacaaacaaacaaacaaaaacagaacattctgggcacggtggctcatgcctgtagtcccagcactttgggaggccgaggctggtggatcacaaggtcaggagattgagaccatcctggctaacacagtgaaaccccgtctctactaaaaatacaaaaaaattagccaggcgtggtggcggtcacctgtagtcccagctactcgggaggctgaagcaggagaatggcgtgaacctgggaggcggagcttgcagtgagccgagatcacaccactgcactccagcctgagcgacagagcaagactccatctcaaaaaaaaaaaaaaagtggaggggacaaagaagcagagaaggatgatcagaaggggacccccagcccttggaggagagacggcagcctcaggtgagatgagccgcaagggtccggggccgcgtctctgcacgctggggtggggcgcgctttgcacagcaggccggtgcctgggctttcaggagcaattccgttttgatctcacatcaaatctgcagctagaacatgacagtccttttacccgaagctttattttaatgtcttataatttcaaaggtccttctatcctagaaaccagagatgggttttgcatctatttgctttttctttcaggccgccacaaaggattttgtggagtcgccccaggcctgacggcgttaattatccctggctttcatcttgatgctcttgcaggggaggctcaagatgccttgtggctcgacccctgcacggagcccccagcccagcctccccgtgggttgaaaccttgatctgggcctgactgtggctgctctggggacatgccctcgtcctttgctgaagctgaggctccagagggggagtcactgccacgaaggttgcccagaactttccttgctgcaaaaagccccaagacttctccctgccacacacacagcttttgccatcgcgttctaaaagctgacagctttctctccaacactgttctccctgagtagggtaaagctacacttggcttccccagtttcctgtttcctgcctagaaacaaatttttgtcagtctgcttttcaaatgggatatatgattcacataccataaaattcaccactttatataattcagtggtttttttgtatgttcagaaggttgtgcaactgtcaaactgcaaattccagaacgttttcatcaccccgaaaacagaccctgtgcccgttagcgtgaacccgccttccccctcccccgggcacccacccgtctaccttctgtccccagggacctgccttccagacagatcctgtaattggagtgtacactatgtggccgtctgtgcgggtctttagtagccatgcctgaggcggccgacaccgcagtctttagttacggaagggaccgcgggtgcaggccaacccccccacagtcagcatgtgtgggctgccttggacacagggtctctgtgtatccccagcagcctcagaacacctgacccagagacggcgtcagtaagcgctggcaggtgcacggaggatggcgctggcatgaggagccttcaggctgctcctagttttaaactatttttacttttgtttttatttttttaagacagagtctcactctttcgcccaggctagagtgcagtggtgcgatctcggctcactgcaacctctgcctcctgggttcaagcgattctcctgccttagcctcccaagtagctgggattacagcctgcaccaccacgcctggctgatttttgtatttttagtagagacaaggtttcaccatgttggccaggctggtctcgaacccctgacctcaggtgatctgcccactttggcctcccaaagtgccgggattaccggcatgagccactgcgcctggcctgaaactcagtgtgtgtgtgtgtgtgtgtgtgtgtgtgtgtgtgtgtgtgtgtgtgtgtgtgtgagagagagagagagagagagagagagagagagagagatggagtctcactctgtcacccaggctggagtgcagtggcgcgatctccactcactgcaacctccgactcctgggttcaagcagttctcctgccgcagcccaggtggggtggagtctgggtgccctggggccctgccaccttccacttggacacgggcgaggaggggtttgccctgagcatcccctgtagaagcccagctccacagcagcgctgtaggaaaacgtagtgtgtccatttgaaaatgaagttttatctattccttattagtctcctggggctgctatgacaaagtgccacaaaccgggtgacttaacagaagttggccgagcatgggggcttacacctgtcatctagcgctgtgggaggccgaggcggccggatcacctggggtcaggagtttaggaccagcctggccaacatggtgaaaccccatctctactaaaaaatatgtaaaaattagctaggggtggtggcccatacctgtagtcccagctacccaggaggctgaggcaggagaatcgcttgaacccctgatcacttgagccaagattgcgccactgcactccatcctgggcgacacagtgagactctgtctcaagaaaaaaaaaaaaaaaaaacaaaaaaaacctaagtggattctcttgtttgtcgggggtgaggcctctcaaggccagggaggtccttcctgctccatcctcggctagcagtggcaaaggctcccgtccctgccctgtcttcatgtaacttccccctgtgtgtctgtcctcttatcttctggaagccagttgtgggatttgggcctctctaaacccaggatggtcccatcttgagatctttagttacatttgcacagaccccatttccaatagtgatattctgaggttctgtggatgtggatttgggggcacgttgtttgaccccaagcaatgtccctttccatctttttttttggcggcggtgggggtggtgcagagtcttgctctgtcatgcaggctggagtgcagtggcgcgattttggctcactgcaacctccacctcccaggttcaagcgattctcctgcctcagccttctgaatagctaggattacagaaatgtaccaccatgcccagctaattttcgtatttttagtagagccagggtttcaccatgttggccaggctggtcccgagctcctgagctcaggcgatttgcccgcctcagcctcccacagtgctgggactgcaggtgtgagcctccactcccagcctcccttcccatcttgtggtcgtgtgtgcttcccggcgcacgtgctatactgagttcagtctcgcgtggggcctttgcctcctcacctcgccagcacagcagctctgccctcgggtccaccccaggtcccgccatgcctgtcacctccaccccgctctggacgatggcagtggcctgctaatgtctcccctacttggtgcccgggcccctcagtcttcccctgtggctgtgccaggaagccaggcccctcactgggagtccctggtgcccacagcaccagccccactgccccttcctatgtctgagccatgctgaggccactccttggactgcaggctttggtgttgctgatccctgtgacccagtgccctgcccagacaccccgtgaaatgccctctagtcaaaaagccaaagacagccacacgcgcccaggctctgcacagttgggcccaccaccctctcgtgcacgcactttccacacttcacgttagccgccgtcgcccccccgccctaagctcctggagaacagagacctcgtttgtctgtatgcagtgcccgggtcggcgctggccccgggatggaggcctgaagggcagacatgctgaggcaaccggagcgtctcatcagtgaacacacgtgccggggacctgtcctggtgccgctaaagaggctgcagagccgcggggtgcggcagtgcttggcgggggcggggtgcagctctgcgtgcatggcgtccacctggggaccgcaggtgtcaagccggggagagccagtgccaggaggtcacacacgatggttccctctacagagtgttccagaaacgatgaggagaatggattggcggtcctcgggctgaggagggcgggagggtggaggtagccgtggacacaaaagggccatgccagggtcctcagaccatcaccctgtgtgttggcggtggggccacgagtctgcacgtgcgaaagaatcctgttggcttagtgtttcaggctgggaagatgaccggctctgaaggtggagggtggtgatgggagagccactgaaccgcacacttcagatagctcaagtggtgaactttatgtttatcaccacgataaaaaatatgacataggccgggcgcggtggctcacgcctgtaatcccagcactttgggaggccgaggtgggcggatcatgaggtcaggagatcgagaccatcctggctaacacagtgaaaccccgtctctactaaaaatacaaaaaaattagctgggtgtggtggcaggcacctgtggtcccagctatgcaggaggctgagtttgcagtgagccgagatcgtgccactgcactccagcctgggcgacagagcaagactctggctcaaaaaaaaaaaaaatttatatatatatatatatatatatatatatgacataaaactaaacatgccacacacacacgagtgcaggggagtgggaacctgcgtgcggcgatggcgtgtgtcctgcgtgcggcgatggcgtgtgttgtggtcttagagggtggctcacccaagcttccctgtgggggaagccgataaagggcacgtggggtctctgtagtgttgcacccaacagcatggaatctacaacaatctcgaaagaggaaaagtcaaggcgtcgggagcccactgccctctggcgagctcctggaggctccatggaatgttcgggctgcaaccaccccagccctcctgggactgtcccctcctggtgctcttgctcaatctctgctagaagaagacagcgtgaggtcagctgaaaacaaaagcaaacttttctgcaggctgcacacccgttggtgttagaattttgcaggaaacatccctcctgggctttgccgctgccgaggatcctggatctggggacatctctagcagcaccgccaggaagaggccgtacagaggacgcacggcaggcccaaccctgcctgctgttcgaataattcatattcttactgccaggactggctccaccaacagccctacccccaggccagggtctccacttctgaaaggagccagacagtcagagaggaccctaggctcctccatgtgacatggggttagccacacaggcaagacaggggcagggtccctggatgtgccctaatgacctgatggcccacaggctgctgaacccatggggtgcaagacaggcctgcatgggaactaccacccctccccaggagtgggtgctggggacagggctcgcgagaaacagggctacctgatcgtttcttctttcttgtaatcgtctggttccttaggagaaaaaaaaattgcttctttgcaaaaaatcaatgggtcccaatggatccatgatgttccccagagccaggaaatcattccgctttctgccatggcctccaggggaacaggcctggccgtggcccggctgggtgttgagggtgggggcgggggtgtctcactccccctgccttgttccctcctcagtccagtggggataacaagacccagccaatgagccaaggccataccttccccgcctgggcctggagcagtctcccttcgccctgcctgggtacagaggggcaccttccctgttcaggatcctctgggctcacaggggtcccggatgtcacctgggatccccagccaagggtggagcagagcctcatgggtctggtggctaggctccgcgcgcccccccccaccccgtgtgctgggcaacccacgcccctggtgcccagcctgccgccccctaccaggccccagggtccaggccccagggtccaggtcccaggaagccactcccccagtcccccacccaaccccaaccctagccccttctcttccttgccaaagagcttcgtggcttcttaaaactcagcaccccgtcccacccccagtgtccccgtcagcggagggagggccttggagggagagaaaagggagtgggcaggtttgctcaggcaggcacagcccacgctgctagagtggagttttggatttacaatgaagagtgcactgcatgtgaggtgcacgctgaaacattattcatcctgacactgaagttcagggctctgcatcttatctggtgaccctaaggagcgtcctgcttcttatctggtgaccccaaggaaaggaggtagtgacccaagcaagggggaggtggtggcagggagagtggcttcaacactgattttccttagtggtgcctcccgggaggggttgccgggagacggggccacctgggggagaggaccgccaggggtttaggggaacgaggtacacccttccccgaagcctcccctgccttcttccagcccctgagggggtggtctggacgggctgtgggcaggggctgaagcctctccctgctggggccactcgaggcaggccgcctgggcgaggcatctcatggatgcctcctgtggacagaaaggacagcaccttcctctctccagagcttgcagtgttgggagatgcctttcctgccgcaaccgtgacaaacacactattatctatcagaaaatcttctaacttccccacttttcattagtcagagccacagacctcccttgggcaggagtgacccgttcttccctgaggtagaggatgccagcctgggcagagtctcacctggcaggatttttcccactccagttataaaaatgcatcttgtatgggctttaggaaagaagatggacttggtaatttgttaaacattaagccccaggtctagcttcaggcagggttggatccaggtgctcaggtacgacagcatggggaatccgcctccccgcagctctcagcttggctttcttccttgctgtctgctccaggcggactccctccaccaggcagcctcggcaagggcagcctcgaaggcggccaggacggccgctccagctggagagggcacctccttctcaggtttccagccagagtcccaggactgccgcccactggcggggctggggatgtgatgtgtgtcaccccagacccattgtggtgatggcgccgagccatggctgagacccacatgaaccctggagcccaggggtggagttggccctgccgagcccaccagagtgaggggcagtggttccccagagaaaactgcgtctcctgaacaggtgcctgaggtgtccctgagagctgaggggttgggaaaatagtcccaagttagctgtgtgatgtccaccaggccacttaacctccttcaacaagatgggtttagctgaggaaagggctcagaacagtgccgaaaacgtcgtgttgtgggccagaagccgttcttcttgttactacggcctgagcgtgtcacatgtgcctggcagcaagaggattcctcccaggcgggcgccagaaagggacccctgaaccttggccctgcccctccctgctccagccctgctgggcttctacccctccacggacccctgtgtgtcctcaaagggaaactgagacctctctggagcttgacccttgaccctgcctcctgctccaggatccgcagaccctggatgttcccccagcaccagtccctggatgtaccatcaggtccagggaggggtttggcccccaggggcactgggagcaagacatccctccatccttaccagacttcagtggtgaagggggcgctgtttggtccccaggggctgagggacctgtctgaggtcacaccgctgggaagtggccccagtcagaccgaccttccagtccagccgactccagaccccatgctcatttccaacccatgagaaaggaaggagagggggtggggggaaggcgaccctccagggaccttagcgacctctcccagcctcctccagccggccacctccagccctgcctgctgagaggcccggcgcttaatgacgttagcacagtgctgtccgctgcgagcaggtgtgtgcaccgccaacaatggagcaattttcggtaatgatggggaggcctgcagcggcgccagagctgcttcctgcccgcgggggcgaggggcctgctgagctgcagccaggcagggagagtggtgccaactggattcggagggccaggcagaggccactcaccaaccgctgctccatccacccccgagcgtggccgagcccattctgcaggggaagaagccgaggcccagggagccccggcctggcctcttagacgggcagggacaggaagggtcggggctggcaccctcccaggaagtctggattctagtcccagccttaatgcagacctgctgggtgggctggggcaatccccgtccgccaggcctcagtttcccctccagacacactttctgcctgacctgggcaactgggacctcgggctccacagcccaccccctgctcctctcttttctttcccccagctcctgccccagcttggctgagtggggtcttgtgcccggcacgatggagggaccccggtggcactccatagatgcttcccgtgaggatcagcagagctgaggttcagttctgaggcccacagaggcttcctggatgtcccactctgctctccatcccagggggtacccccaccagcaactgcacacagtggtgtcccccaagagggcacagtccacgggagtggggggagctacttacacctgcctggtgcccagaacacagtaggcactcagggacagcatgatggagccaaaagagcatgggcttcagagtcacacctggcgtccagtcctggctgcactcccaactgccgagggtggcgtgggacagaggtgtcaccagcctcccaaaccctggttctcatatctgtagaacgaagcaggtccgtgcctcccaagatggcttcaagggcatagggttccccacctggacctggcacccaggagagtgccagtaaatgttggacgaaaggctcttcatacctccaggcccggctataagcactgggtggtctgggggcccagagagacagtgccaggcagccatgtgtcccccaggtcagggctccagaagccttgcctggggccccagctgtccctcgctgtggccctggctcaccagtaactgggcctttcctacaggacggaaatggggttgcctgctgggcaccctgagagctcaggggcttcatcccaagctgggaaggatccttacccagcatgtgcccagaacctgtcccaggggcaccccagaaccagcacgaggcaggtgaggtggccagacacacagccagtggcagcctctgagggcctgggcccctatttcctgaggaccgcccagggcctggctgcagccctgtctcctgcaacagaagggccgagggtggccccgctaggtggccaggctacccacatgcaccatggtagccctctgtgtccccagcatgccctgttcctcagggactcaaggctggctgttcgttggtccagctcacagaagctcagggaccacatgagtgcttgccctgtgcagcccactccccaccaccatgcctggcacacagtaggtgctcagtaaacagcagtggcctgggtgggcagacacccaggcggcagctccagcccggggcccgcaggctctgtctcccctcccaaatgctcactcacagagagaggcccccttgtgtgtttgtttgctgcagaactcgggcccaatagactcggtgtctttcttctctcctcctccatcccgcacaggagctccagggagcagcagtttccagagattgaaggcaaaattgcttgaaagcctgtgcttgtatcctccaatttgtagccatttagcagggccgggcggaggggcagccagggctctgctgggttgtcggcacagaagcatccatcactgcagagaacagttctttgtcctttcccagacagctctcggctatgggaacaacacccgctgcggagccaggctgggtggtactgggggcccacaggggaggccaacggctggcctgctggaggagcctcagggcctcccagaggcagaaggggcgccccactctgaaagtgacatctgccatcatgcttccagctccgcttgggactgtgcccagccccaggggcagaggtgcacacgggctggggctagaattatgaagaaggcccaggtgtccccagtcttgcccctccctctgtcactaagaggggccttgtgtggcttctgcccaggaagaggagcctgtctcggaggggtcacttgagtgtctgggaggcagtcagaagtccaggagccggaaggagagcagggatggggggtaaggagaggggggatgggtgggggaaggagagcagggatgggggggtaaggagaggggggatgggtgggggaaggagagcggggatggggggagggagagtggggatggggggtaaggagagcggggatgggtgggggaaggagagcggggatgggtgggggaaggagagcggggatggggggtaaggagagcggggatgggtgggggaaggagagcggggatggggggtaaggagagtggggatgggtgggggaaggagagcggggatggggggggtaaggagagcggggatgggtgggggaaggagagcggggatgggggagggagagcggggatgggggaagggagagcagggatggggggtaaggagagcggggatggggggtaaggagagcggggatgggggagggagagcggggatgggggaagggagagcaaggatgggggggaaggagagtggggatgggtgggggaaggagagtggggatgggtgggggaaggagagcggggatgggtgggggaaggagagcggggatgggggagggagagcggggatgggggaagggagagcagggatggggggtaaggagagcggggatggggggtaaggagagcggggatgggggaaggagagcggggatgggggaagggagagcagggatgggggggaaggagagcggggatgggtgggggaaggagagcggggatgggggagggagagcggggatgggggaagggagagcagggatgggggggaaggagagcggggatgggtgggggaaggagagcggggatgggggagggagagcggggatgggggaagggagagcagggatgggggggaaggagagtggggatgggggttggaggggggtgtggagcttcagattctgggagaagtttccggggagtttggaaaacaaaagtgcaggtctagcttctagcttcagggcgtgaaaaaggtctggaggtgaggcattttgctgttagcttcccctctgcagtgctgagagccggcatggctgggaagcggtgctttgagggggagatgcaggtctccctgcccaggtggaccctccacccacccccagcactggctgtgagagtagccagaaaatggcgagattctctccctgggtaggaaggaaagatatgagcagaagcgtgcctagcaaggctgcactgtcggaagtagagtgggctcagagacgtcaggaccctggaggctggagctgggggacgggacgttgggggaggtggcacctggcccaccgagtttgcatctcacctaggttgggcttgtctggtttccaagtggcctctgagcacctgggtgtgggccagcatctgcctgggttcgggctggtgtctgcctccctctcctggggcccctggagcaggtgcaacggccttcgggattaaaggctcacgggccacagcgaagggtgctaccttccctccctccatcttcctcccagcgtcctcatcctgcaccctcagtcccccctccaggcctttgtccaggacagctcctctcccaaagatgccttcgctccagggctcatcccttctagcagcccctccagcctagctccagccagctagcccaatccctcccctctggtcactgcagtccctttgccacccagaccctgcacacgctgggcatggccatgatcctccctgggtcccaagttttgctggggtgcaaccctgctcctgaccaagaaagatgaggcacctgtcctgggggcaggaaggctgcatgtctgtgttctcagggccagagcgggcccctcctgtgcagggcgtgggctgcatctcctcacccgccagccaggtcttgagaagtgcaggggtctggcggtagggcacatgaaacccttcttgggattaaaccctggtgtggcaggctggtctttcatccccactgcagtcccccgacttagaagaaaacacagagccctcatcctcacgcctgcttctcagtggtttctggactccctggagtctctcctcaaagcacgaaggctctgagcaccccacaaagtcctcaggaatcagcaccaataaaaaaatacactttattgtgacctcacggtttgcagggcagcgcagcgggcacaggcagaggagcatgcagagcgcgtggcacgggtgcacagcacatggcgaagcggcccctgcccgggcacctcctctggaccgcccctgcacgccttgggaccctcgggcccagccgggccccctcctcccaacaacccccagaggtcctgggtgagcaaacagagtggccggggcaggcttggccaccagggctggtgtgagcccagaggcggggtgggcagaagcagctggcacagctcagccggaagccttagcggagggaggagggcgtgggagcccacacctgccaatccagccctgagctcctcagcaattttgtctctcttgattaaacatcccaggaacatcaagttcacagacatgttttcttcttcatctttctgaaaacacccagaatggaaaagcagagaacagcttcgaggttcctagggccccttgacacttttgggggcagagagagttggtgggaagaggggtgaaagggccaggcctgaggcttatgcaagagacagaaggcagcaaaggcagtgtcctgggcttgtccggggagagggacggtgtgcaggtgtgtgcaggggtgtgcaggtgtgtgcacgtgcagaggcaaactgctagggcaggaagcctggagcacacccaggtgcttgctttgggaagaacaccaaccagtaactgcgaagggtgggcaccagcagggggtgggcagcatgtctgggacctccagactgtccctcccggtggagccagaatgtggggggcagggccggccacccagcctccagtccagccagtgaggggccctctggccaacccaggaaggcgcctccatggcagggtggctgccgtggcattaagagagggccacagacacggcggggctcacccctgggggaacgagccgggtagggggcagcagggccagatgcccaggagacctgggctgagagaggcgtggctgagggaggctctggtgggccactcacttccagcagtgctccagggagctgtggggctggattttgagcttctgggggcagagcagcttggtgaaggcccggcggaagctgtggtggcacagagggtagaggacagggttgacagccgagttggcccacaggagccagaaggaggtttcgtaccagtagtcagggacgcagtggccatggcaggcggcccggatgatcatcagcagcgtgtatggggcccagcagagcccaaagatgctcacgatgacggccagcgacttggccactttcctgtcccgagacagccgaaagcgctgggtgaagctctgggacaccatcttcatgcgcttctccagcgaggccgaggacgccgacggcttggagcccctcttgagtgagcgcggcctctcagtgcccctcgaggagctgccggagctggaggtgggtgaagccacggagccgcccccaccgccacccccgagggtcgcctccccggcctcagcgcctacggccgcctcacccaccccatacctgtgcagcggcatggcctccccgtgccccttctgccagcagccccagcagccaggcggtgggggtggtgagggctgggcctcgggagggggctcggggccggctgcctctcgagccccatccagccggaggcgggtgcgcctctggatgttcaggtagatgctgaggttaaagaaggtgacgctgaggaagggcgtaaagaactccagggtggaagccgtgatgaggaagtaccagttgtagaagaactcggcatagcagtggccctcggggatggagctgcccccggacaggtactcccagctcaggatggctggtccgtacagcaggaaggccagcacccacaccagcagcatcttccgcactgcccgccgcgtgtcaccctgctgggcccggtatgagacctgcagaagggcaggctggtcaggggcggggcggaaggaatattgggctgggtgcgcccccgtagcctgtgggcccctatgtgggcccttccctcagcagcaatgctcctcctttcccctcctgtcctccctccctccctctttcccctcccttcctctaaccctccccactggggtcccggactggtgccctgccacactcagtgagagcctcagaagctccctgggaccaacctgaaccctcactctctgctaggctgcctgtttaccaccccctaccagctgtgagctccctgggggtcctgtccttggcccctgcacccttgggaccagactcagcatcagccccagaccacgtgcacacacagctgtttctgacatgatgcatcctgatcctgcaaaggcccgagccatctgcagaggttggggtgggaggtccagccccactcctgcacaggtgctcgcacccctgggagctggaggtgcaggggtgaagccacaagttggcccactgctgggagacatcccccgccccgccacagaacaaagcatcccagatcgacatcagggcctcttgggaagaagagggagagagggcagggccctcctcagggcagagagcaaccagctggtgggggcagggggcaggagggccaagggatcccactgaggggtctcaggtaggacagctcgaggaggaggacctgagagcccctgccaccctcccccaccagcctgatggcgtttaccttggtgacggtgggagcaatgttcacagctattgctaatgagaggtgggcagagcacccccatgccaggctctctgctcggccgctttacccttcgtggcagctctccttgtgccccatgcctggtggctccaggaaaggagggagagaccacagggggatgggctcaagaggaacccaaagccatgctctttgcaccctgtctcttagcctttctaggctagaaccaaacaacctgccctcagtcctgcagaggccctcataaagccctggggacgtgagctgccaaggagatgagaaggggaaggtgtgacttcagcagcggctccctgggctgcatggccccgatgcgggagcctgggtggggcagggtccctgactcaggtggccgctcccacaaagggaaatctgcggagccaggatctgccgcctgccttcccggggcctgtgtgtgtgtgcacgctgcacacacgcatgtgggagggatgtcacccagggcgtctggccccagatcctcccttaactccggggactgtggacctgccccagggcgggggctgcagcgacagccctgccttcaggaccatctgcatccagattccccgtctcctgcctgggccaggtcagtctggctgcagccatggccccgagtgggcagctggccgtcgagtggcccatgtgtcagcagcaaagccagtgggaccaagcccacttctgcccacaactcagaagtggccgtccccacccaggtgcctcccatgggcgtcccgactgtccctgcggagtgaacaggagctccgcagcccaggactcaccgctcgggtgaccgacaggaagcggtcgtagctgatgagcacgatgttgaaggcagaggaggtgcacagcaggtagtccactaccagccacagcttgcagaggccccggccgaaggtccagcggcctgtcagcacgtagggtacatacagtgggatgcagaaggcgcctgtggggagtagggccacagtgggaccatgcagccaggggccaggggacagacggacctaagcgcagacaccggcgggacctggggtcacatggtggctgcttttctggaactagccatcctcatcttaccacccctccacctggtgtcagccacaaactctgccctgccgccagccttcacccccacatagctcccagcactatctgtgtcccctgggcctgggggcaggagggatgatccaggcatggggaactctggccaccacaagacccccgagagcctggagtcgggattccctggacttctgtccagccctcccagccctcaaaggaggaaagaagacaatttccttctcccctcccccgctggactccagcccctaccctggcgctggacaaccctcggtctcagcttagacaaggagaaagcctttctcctggctgaaagggcacttggttgcagccgccagccgccagccgctactactactgccaagcgggcttggagcgtctgggagacgcacctcacagccccaacaggtgtctggcgctccagccccctccgcgtgccccgccccccagccggcagcagagcctggacacgtgagagcacgctcctccgagcgtctcccccaacccccaccttccccaccgtcccttcccccaacacagctctaaaaatcccccttccatgtcccctcccccagaccttctctaaaccgccccactgcgccctccgcgcgtcctaagtccgcagcagcctttgtttggctacagcgcaggagccagagctgcacccgctgcctttgcgccttgcgcctcgcccagtgcccgtgtcccttcccggggacatctctccccagcccctgtcccgaggcctgagtggcaaggaacttcgcctgtgccccccaccccatgggctccggacgcccccttcccaggccgggtcccctggtggggcgtgtgcctgcgggagccacccaggtccgtgttccagtccccgctggcccggccacgctgggcgcccctgggtccccagcggccaggggctggggatttaccgacgaggaagtcggagatggcgaggttgagcaggaagaagttgttctgggtgcggaggctcgagtcggccacgaaggcgagcatgaccagcgcgttgcccagcaccgtggccacgatgagcagcgccatgagcgcggccagcaccgcggtccaggctgccgagaagccgcgcgccccgcccgccgccgccgcctcgcccgccagcgcccccgaagcgttcagcggcccgtcgggcggcgcgcgctccatggccccgcaggctcacgcggctccgggacgcggggcagggcgccggccgagagctgggcggccgggaggggccccggcccgggagcctcgtctttgcgggcccttggccgggtcgggttcccctgggggcgcccagcgcatggtccgcggggccggggccggggccagagcaggcggtgccgagggggccggggccggatccgagcccagtggggccggcagcgcggctgctgcagcgggagaggagccggagcctgagccgctgccggtgcgaccgtgcagccggagcgcaacgcgcagccgagtgcgccccgcgcccagcccaccgccccgcgcgccccgcgcagcgcccccgccattggctgccgccctcgccccgccccctccccgcccccgccccgcccggcgccggcagcaccacggacagcgccgcgtgcccgccaggctgcctggagcccagcccctgcgctcacagcagctggctgggagcccggccggggcttgaccgggtctgggggctcgcctgcggtcagtcagcccgcgcactcggagccggggtctgggttgctcggcctttcccgtgccctcggccctggtgacccctgcccggtcatcatggagagccctggcgcctgtggggacccggggtgggggtgggggaaacgcctgcacccgcgctccggggacttgccctgcggggcatttcctcggtgcatgttttgggaatgtgggtctccggggcaaggaacgtctggaggagaagggatggggaggagggggtcttggaaagccggtgcccagaccaggggtccgctccacctcccgtttgcacggaccctgggtgccagcctccgtgtggacagggcccagtgcagggtccagggtgacccgcaaggcgcaggcagatgtggagttacataagggaagatgaggcgccgggcggacccagccggaggggagcgcgtctagcctgggctccggcggcctcaggctgaggagggagcagcaagccgctcggagcccagccacggacccctgtggacagaggggcagtcgccactgcagcggacagacgaggtcactgcgctcagggcgcaggtggtggctgtgttagcgcctgtgggaggggacgggggaggagaggagaggtggcaggagggagcgcccccaccaccagacacatgcgctcagatacaccgggtcaaggacagattcctcctgaaacactgagggcagacagacagacatgcccacactcagatacacagacacccacaggccagggaagcagccaccagcgccaggctgaggacccaccaagagcgagacacacatcagacagcaggcagggagggagccgcgccccaggagaaggaagcagcaactccgctcacaggagaaggaagcagccgaaggcatccctggtgcctcaaagaggccagagtgcgcgtgtctgggggaggggctgcagaggggaccccgggcgctgacatgcaccgtcactcccctacttatagcagcttccccatactgtggggacctgccccttcccctcgccccccgtggcgcttcagaaactttggggaaggaggagctgggattcctctgctgccacctcagggctgactgcagaaaggaacccccagacccgtggccccagtcagcccactatttcacggcttctaggagtctgctcttgggggaggggttcggcttccctctctgactgcttggttgtactcatcccactccacctgcaaaccctactcctcatacaggctcccccacgttccctgcaccccaccccaactcacccagtgtggagggactctgcctggaccagggaaaagttttcaaggggaaaagttccatggagctgggcagcaaggggctgtggggccatcagagctgccacccatgcctgctgcagctcttgactcactgtccccacccaaaccagaactccttgttgagaggactcctccccaggcccttctcctccccaaatacccactgaggctgcaggagatggcattgggtgggggttaagagggggccctggctctctccttcactggctggagcctcagtgtccccatcttggaatggggaatataaattggaatcccaagcagaaccaaggatgaaggggtctggaggcccgcccagccattctccctccccacccctcctcccctgtcatccacagctgcccaggcttccccgtgaactgaccagccccggagagcctgggcagtgctggcctgagccagacgacccagacagagggagctttcctggtgttctctctgccccagagcctcaggagggacagctgagcccacacctgccccacagctgttctgaaaccctgcggaacctgcaccaagatccaggggcccatggaatctggacccacaggcggggaatcccacacagcgtggcatcggccaggggacccacttctgcagcctgtcaccacagtggtgacacatatccatcacacgcctgtgggtcacctcagggcacgcttgcgggaagtcagaaggaggccccggggtttggcccctggcagtggggacccaactgtgtgaccccggctgagttaccaaacttctctaagctgctgtaaatggaggctacctagagaggagagggcctggcttgtccccgaggtctgatgatgacagtggctggcggccgtgaacgccccctagactcagccagactcggtgggagtgcttggtacctgacctcaccagcccctgcaagaccataaagttgggcaggacttgcctccctgcagtgctggtgagctcccccgcccgaggtcacgcaggcgcaccctctccatggccacatgtccagcccagcctgaggccagcaagcgcaccagcatgaccagcagccatgccagaggcccctgtccttgcccaaacaggaggccactgtcctctggggtggggcttgatgtggccacggcaatgcagggtgcatgtggctggtccctgtgtagcccgtctagccctggggggccctgtcccagggagcagctatgttgtgtatgttgtgatgagaaaagaaagtcgccaggggagaccatccctgtattcatgggcagaggccaatgtcccggcaggctggtccgggctggggaggaaaaggactagagatggagacaggagctctgggccagagccatgtggacggccacgtgactgggggcctagcttgttggtttcgtatcacaagcaaacacccacaaggagccattcaccctgaagacgtgacattagcaagcctctgtcatcggccaccctcgaactgggatgtttgaggtgaatgcagtgagtgcagcacggccccaccgagtgcagtggccaccctggaggctacgtgtgggccaaagggcaccgacccccacctcccaaggcccacctgctgctgctgcctctgaatgtctgaccgccagcaagcgttcaacacccagccccaagaaggggacattctctgaggacagcaaatagctgctggtgagatggctccatgggtccccttcccctagccctcatggaccacagacctgctccgggtgtgcgtcggcctgtcttgcctgttgagcctacgctgcaatccaggggcctatggacctcagatccacaggcagagattcctacacagtgtggcatctggccaggggaccctcttcccatgaaggcagagccggcatggcccccggccatgggcccaccagggtctgggctgccacaccacccaggagcagcctccagaggcacaccagcctggggcactcacctccaaggctgactctgccctgcagacacggatgacagagcagagtcctttccatggcgtcacgtctccaacaagaagaccacaggccttcggaccagggaaggagcaggaggggccccgcctggcaccctcccaagcatcctcaggggaatctgtgctttccaaactctgggctctgcagggctcaagcttctcatctctgagggacacctgcttactggggacacagctgtggatggctcccaggcactttgagctcctgagctccagcagacaagacgaggagccgcctttctgtcggggtaagtggccctgatcagcaggagaaggtggggctgctatttccaggagaggaggggtgggagggggtgggtgtgagactcagggccctcttgggtgccacggcaccccctggcctgatcgtttctgtgcatggacaagtgtggccaccccagcctgagaaggtccagtggccagggctcagggaaggagcgtgagcctccaggacctgcagtggccacagccgaggtgggagagtgcaggagggaggggacgcgtgccaggcggggccccagctcagctgcccctgtcccctgacccctgatccttcacaggcctcaccccaacacatctctccacctcccacgctgtctcggcgtctgcttcctggaggacccacagcccaggttccaattttgaaagggtggtcagggagtctccactgaggagacacacgagcaaagggggaagaaagggaggtggatattggaggaagcagagttccaggaaggagaacagcaggagtgaagggcaagggatggagcacgttcgtgttccagggacaacgaggaggctcacgcggccggagctcaggcgggggcatggggagtgcgttccaggggcaggtcttgtagccccttgagctgctgcaaggatgctgatgttttctcagacagatgctccaggagggcctgggggacgcttttacacaatcccctgactgcattggagagtggtctctaggtggatgggggcagagagaccagaggggaggcgttgcaagactccaggtgggaggcaatggtggcggtggaggtcaggcagacctgggcagattctgacatgagctggcatgtgaggtgtgagagggcagaggagacgaggcgcccagcccaactccataatttgggctcaaatgcctcaaagaaggtgctgacaatgaaccagagggagcaggtttgggggacgaagaggtgccctgtttgagggcgccaaggctgaattgccaacgggatgttcaagagatgagactggtcaaatgggcagccaggggctgggatgagaggaactctgggctggtggccatgctggtgtcacagcagcggacagcaggacgctctcccatcaccctgtgccatcgggggagcagctctgcggccagcatctctggtgcccagaaaagctgatggtgcgcccaggtgctgtccccgcagtgctctgtctctgctgcatggggacgcagctgctggtgagtaatatgggggtgaggcgcagggccgccagggccagtgcaggacaattgtccttctagttacagccaaggcacctgtgggggtctggggccagcactgtgccgcctcttccaaggaacccatatttgctttctctctttctgcaggagctcatttgaatatgggaatgtaaatttttctttttttgttccatgtctttttttcccccgtgacattctgagccagctccgggtgcatcctgacgagctcagggcctgggtgtgacaagaatggcgtctgaggccgccaacttggaatgaaaagttgagtctggtttacctgcctttgcagaccaggcagaattgggcccaagacttgggtggtaggaaggagagaggggacaggagagccagacattagttgctatagtttggttgaaagtgagagagcccaagtccaaagggcctaaggacaaggagcaggtgctgtttcctacgcccacgaagtccaggggcagtgagtttcaggcacagctgcatctgggctcaagtacagttgctccctccatttcgtcttatcctgtgtgcacttcatcctcaggcagggattatctccctgaggtctctccctgcagctccaagtgactcccctgtcccctcctccatccccaggcaggagaggaggctgcctttcagccaacagaaccccaggatcagctgctttggcctggcattggcctggcttgggcaatcgtgatgcctgagctcacaacggtggactcaaaccctggctgaggatgcacgaggagtggagggggagtagtggtggtcatccctgaagctgctttgaggtccccgcgaggagcccctgcttaatcccccagcaatgcctcaggggtccaagtgccatcctgctgggacagtgggcctgggcacagagagcctggccgtggttggggcggcagggaaagtgcgactgcagagatgaccttctctcggggcatctgcttctcttgttccctggctgctgtgagaagtgaggctgagagagcagggagaggggcagtgatgggtgatggcagtttggcaggtctcaaggggcccgggcaggatggctgtggagccacccgtggtccatccgtaggaaggaagcctgcagcccgctcggggtctgctccctgctcacccagggctgatacagccagcttaagggacagggtcgcaggctgggcgtgggggctcatgcctgtaatcccaacacttcaggaggccaaggcaggaggattgcttgagaccaggagcccaagaccagcctgggcaacacagacagatcctgtctctacagaaaataaataaagaggcaggggcacacccacaccacaggccaggacagcggcccccagaaaaccaagctccaatcacacctcagctccttctgctgagactgggggcctgttgagccctggggcctgggtccgagggcagaggctggggcagggagagtgcagaactgaatggagcctgacccagcgctcttccctcctaaggatggcgcccggtggagacatcaagcacgagagaaggagtgatcccgggaaggctccctggaggaggtggtgcctggaggcggtcttgagaacccaggtctgatctgagggtcaacagcccggtgagtgcagaggctgccggagaactggaggaataaaaaatctttgccggaggaaaggagctcctgcctccccggaaagtccctccgtgtgagccagactgttgctggcgtgcagtgtgcacctcctagggctggctgagaagtattcgctgaatgaatggaacagattgcatctgtgcagcctccctccgtgggctaggcatgaagacgtgatagagaaaacagaaaagaagacagaaagcagaacggtctccactgtgcttttccagaaccctctgaaaggccgagagggctccagggcagctgggacccagccccaaacccaagtccagctgtgggggacccagccccagcccaggagccctcgccccatccgtaagagcatttggtggggcctcctgtggctatgatccaacagagcagcactgcctggggggcctccgagccaaacccaggccatgacccccgatccctgctggtgcctgggggtgaatcaggccctggacagtggtaagcatcaagccagggggccgctgggccaggccagaggtagggacaggccctgggggagggggatgtctggaccgtcaagctggttggcatccagctcctcctgcttcccatgccagggtgccttgagacccggctggtgtctgccctgaataccttgcccaccccctcagcctaggtcccccaccaagtggggaccaggcttggtgaccccggtccatcctgcaggcccccatccagggcgcaaggctaggcaggccagccaggggccacgtgctcctggctgctccacacacaggccgttggggccctcccctccagcagctgaggtcagcataggcaggggcctggtggatctagtggagggcgacagacaagaacgtgggacatgtggccagcacacctgtgctcaccgcccagggctgctggagggctagccccgtctctgtccaccccctgcctcccgcctgggtggggtagtctgtttggggaggaagcaaggatggccacggcgggggcacactggaggcccgttgtgagtactgtgcaggccggtctccatctggctgccgcctggatccgttctcagggtaaggctgagaggccagccttaccctggaacctgaagcctggtgaggaggtggcccctcctcctccctctgtccccacctcctgcacctccatgcccctccccagacacacgcccctcacgctctgccccacccggcaccttcccctatgggtgcctcctcccagaagccttcagggttattccaggtcttcccattgcctgtgctgttcccagagctgctggccgtggtcccaggtagtgtatgccctcacccctagggcaaacgcagcgccctgacccctcctggagccttgggtcctcttcccctgcagaaggtcgggaagaggcgccacgtggaggagctgagcagtgcaggtgggctcagggagcctcgtcctggagggggagtctgggccctacgaggacgaggacagagatggggacagggacggggacgaccctctctgttgactccctggagtcccgcagatccagggcagctcctggggacctggtgcctgctggaaaaactaacccagctttgatcagtgctggggccgggacccagtgaatgtggccgcccccgtgtgctgggggaggaaggatgggggctcccaagcagcaggcaaagaatgcatgcgtgtgcgtgcgtgtgtctatgtctgcgtctgtcagtgtacacgtctctgtgcatccgggtatgtctgtgcgtgtctctctgggctatgtgtgtgtgcacgtgcgtctgtgggtctgcgggtgtgtctgagggtgtttggtgcgagctgtgacagaggtgtcgggaggaaactgacactgtccccttctgccctgcaagggacaggtcagggtgggagaaacagttcctccctccacaaggccctgagccagggcagggggcgacaattgctctagaggcagactcccctcccctgggtctgggcacgaatcactgtcacttgctgcccacacgcctttccatacacacacacactcaacactcatcccacacacactcgcacacgcaacactcacacactcaacactctcacactcaccccacacacactcacacactcaacacacacactcaacactcagtcacactcatcccacacactcacacactcaacactcacacacacccacacattcacccacactcacacacactccacacttatcccacacacccacacactcaccccccacacactcaacacacactcatcccacacactcacacactcatcccccacactcaacacacacactcatcccgcacacactcactcaaagactcatacgttcaaacatacttccccccattccccacacactcacactcaaatacgtacacacttcccctcaattcacacatactcacacacacttcccctcaattccacacaaacacacacttccccattccacactcacactcacacacacttctccaattccacacacacacacagtcacactcaaacacatacacacttgtccccattccacacacactcactctcacacacttctcaattccacacacacatacacacttccccattccacactcacacactcacactcaaatacacacacatttctccccattccacacacacaaacacatacacacttccccattccacactcacacactcacaaacacgtacattctccccattccacacacactcaaacacgtacacacttcccccattccacacacactcacttccccattccactcacacactcccccattccacacacacactctcacacactcccccattccacacacacactcactctcacacacttctcctcaattccacacacacaaacacatacacacttccccattccacactcacacactcacactcaaacacacacatttctccccattccacacacacacaaacacatacacacttccctattccacactcacacactcacaaacacgtacattctccccattccacacacactcacaaacacgtacacttcccccattccacacacacactcactctcacacacttcccccattccacacacacactcacacacacacttccccaattccacacacacacactctcacactcccccattccacacacactctcacacactcccccattccacacacactcactctcacacacttcccccattccacacacactcactctcacacacttccccattccacacacacactcactctcacacttccccattccacacacactcactctcacacacttcccccattccacatacttatgctcacacagtcacacatacacacaaactcacttccatactcacaccctcaacacacccatacacacacactcccaattccacacactcttccactcacacactcacactcattcacttccacacacgcacacactccaattccactcacacacatttccactcacacacactaacactttcacacacgctcactcatacacttcccccaattccacactcttccattcacacacacattcattcacacttccacacacactcccacaatgccacacacacactacacactcacattcacactctcacacacacactctgccacacacacttccactcacacacacaaccagaaaacaagggaacaagctgtcccacctgggctgtccctgggggagcaggggagagtgcctgggaccgaagggctttgtagggcctcacgtagctttgcttggaacccaccaaagtggcatgggtgcgtcctggctgcagctgggaacccgaggtcccgggccagaccaagggcatgagcagggggcagcgccgggccttgatggaggatgatggaggcgcagctcctagacccaggtcagaggctgtctttgcaggacatgatggggccatctggtctctccccaaggccctgagggaatgacggtccacatccccggagtgcttgttaccctggtgcatccccctgaccctcccctacactggccaacctcacctggatctgcctcttcctggcatcccatcatcctctcactttttctggagttgcttagctgatccaagcagagatgggagtgcccaagggatgcacggtgaggtcactgggcgactcctccatcccctgggctctgtgtcccacctatgcagcactggatgagccagtggtggaaagaccctggtggaaacatctggggctccttggtgtgcatcttgagtgcccacctgtgtgctcttctgaagggtgaccccagcccggaatgccctgatgaggagaggagggagtcagagacctgttgggacatgtggccgtcctctccctgtgtggcgaggtgggcagatggctcaggacacttcatttaccaggatggaaactttgcctgcatctgagagtacactggtggtgccatctccttcaggcatggttggatccaggagcccgacggctaccatcaaaactggtgtccccaccctgggctcagcctgctgtcctctcagacagcccttgcccttggcatggcacctccaggctgacatcccagctcagacctggggtccatgaagggcccaagtacgatctgactgattatggctaggcaatgagtgatgcccaggtcccagtcacatgccctatttggggcaagagatgggctcagcctagtaccagcctatgggtagttcccaaagaaggattcagggctgctcctaggagatgtggtggatactgggcagagccccggcaatgcccacatgccctccaaacaactttcccttgctctgccttctctgagcctcaccaagcccccacgaagttgaggctcagagtgcctctgtggcctacttaggacctccatcagcagctaggatctccctcagcacctaggacctccatcagcagctaggacctccatcggcacctaggacctccatcggcacctaggacctccatcggcacctaggacctccatcggcagctaggacctccatcggcagctaggacctccatcggcagcgaagacctccatcagcaaaggctgggtctagacccccatgggctccagattccacccaactcccagccatctgcccagaccgacccacacccacctcctgcagatgccctgggcattactgaacccctatttcctgaagccagccagcgagtgggagcaccggccagcatggtcctccctggccccagggatctcccagccctgggacatgggacccctgggcagactgccttcccccagcttgtgcaggctggcaccaggcacagaagcccagcacagggcctcttatcagcccctccatctcttccccagaacaggcccagcctgcttgcccagcctgtcaccatgcctggcagggatggcatcacccagccggctgtgtgcaactgctgaaaccccgtgggccctgcttccagtgccgcaccctcctcgcccaggatggctgcaggatttaccaggtcctccgcacagtgaaaatgtgagctccttgccccaagatgatgaagaatttcaagacggcaatggtagattggtaaattaacctcaggtgccatgtgacagcacaggttgggtgctgtgagccatgcatgaagctcctggtgggtacagctctgcctcatgggtcacccctctctaccgtgaccacgaggactgggctgggtatgcagtgccctgctgtgacccctgacacacagacccctagccatcccctccaccccctccctgacctcctctcccagggatgcaactgggggagcacacccatccccagaagaaccccaaatctctggctggctgtctcttacccaacccccatccccagctccagctgaggggcaagcgtgctgctgggctgctcctgaggagaaacccatggcgccaccctcaggcccccggtggctcctcaacctgggccccatctctgccccccatcttggctcctcaggcatatttaaactttgcccctcccacccccgtgcctggcggatcccctggcactgaggcccagccagtggctccagccaacgcacttggctcccgcagcaagttaaatctaacccagcccagctgtctctcctccggctcccacctgcccctcccgttccctgcagggatgtgcccacaccctgccaaccctacatgggccctcaggaagggtgcagaggtcccccagggtcccccactttcccacactaggaaagccctttgcctagcagcctctggggtgggtgccctgcttctggaggtaccccggcacccagggtggggccagcagagtgcagcaggttttcaacaggtatttcaagaaggagcaggaacccacttcccatcagtcagggtgcagccaggaagagggaaactccagggccaacgctgaagtggccgctgcagcaccacgctggggcacggagttggagtacagcccttgtgccacaggcgtgccagggaatgtgtgccaggcgctctgtcttgcatctggggctgtcggttcttctgaggcagggcactcatgggtcgcttctggagatgtccacatttctgggtctgggactgtctaggcctggctttggggccatctgtaatctgctccccgtagccccatgttttgtttaggctggaagtgcactcagctaaaatgccgttatcctaccaaaagtggcataggatggagttctggccagtgagatgtgagcagaagtgctgggtgtgtcttcagggacagatcctcaaagggagctgactcatctagggggcagcacttttgctcttcctcttttccttcctcctttctggtcaggtatgcttgtgatggctggagcatcagcagctgttttgggccatgaggtgacactgaggctggaagccagcactaggagagtgatacagtaaggtaggagctgcgtccctgaggatgccactaggagaggatagtgtaagataggagctgtgtccctgaggatgcatggtaccctgccagctggacagcgcaggcttgtgtcaccgagagaaaagtacgtttctactctgtcgaagcctctgttactctgagctttctcaggaacgcagctctaaccagttctaaagggcaggcagccatgttggctcaaatgcttcccccagcaaggcaggaagccactccagtgtcctgcaagaaacttcatagaaaaaaggcttccatccccatatgttgggggtctgcatcaggcccttcctgggccctggagcctccatgtgcacctgagtgggaagggctctgggaagcctaaggctggggagggcacctgttgactttgtttaaatagtgttctcaagcctacttgactgaggaaccccttcctccagaaacaaggaattacagccggaaaggcctctgggaaggccaccttctctgcccttcactgcggggtggggcgtgtccctgagctactgcactcagaggagctgggcctggccccgggcaggcagcaagcactccaggagaggctgtggctgctgccagctctgtgagcgggaaactggggggcctttctcccctctccccagcccctcattccaactgctctggagctgtggcctgagccccaccctggccctctgctcagaagggcctgttcccaggcaggtctcagtgcccaggagtggagaggggggctgtggagaccagggggatcatcccaggaagagtgggtttgcaaagctgcagcagcaaggaagctgtggggtaaaaagtttataagaggaacactattttttcttttggcagaatttaatgggtgcagattgttcaggtcccaaagacatgggaaaaaaaaaaaagagagagagaaagaaaaagccctttgctgctgctattgataacttgtctcgcttcacgtggtgggttcaaaactaaaaatactctcctccccacagcagagaagccagggctgtcacgtcgcagaggagactggagagctgcggcggggaggggtcagctgcggccacgtgagggccaggcccctctctgactgcccaggctgcatccacacagaagattccatggctttccataaaagagagtgggagaatgtcctctctaaaggcctggggagtgcctggggagaggagacagcctcagctggggctcaccagccagcagctgccagccaggccagcaatgccaaggcacccggcgttcctggaagccaagccctgtttgatctaatggggcagctgtgggtgcagacccagataaagagataaacccagacccagaaacctgggggaggaggtaagagtggagcgggggaaagggcggtgggtcgtaggcgggactggtgctgccaggccctgggcaagctgcttctgctctctaagcctcagtttccccatccaaaaggtgggagcaacaacctctcttccgcctccttcaccgtgagaggaaaggaagcgggatgacatagttgtggctgggactgctggaccccgcatgccagccctgggaggtatgtgggtcatgaaatccacccactggtgacctcccccatggtgagggagggagagagcttctcccctccttggctaagaggacagagggaggatcctacaaattctgtcaggaagcagaaatttggtctgagagcagtgaaggtgggagcagacaccccccaaatcacctgcaggatgagcatttctcaggctctagagagcatgtgtgggacacagccgccagcccacctggtgcgggggtccagcagccacagccatgggaactcctgggcctgttgttcgtgtgcggatcctggtccgggagcctggatgcggctctgccttgccgacaagctcctgggccaggcctggtccaccagacctccctatgcttggagtgcctgcttgttgtgcctggagctgtgctgggcccttcctcattgcagggctgggggagtcacttaacctgtctggggctcagtcttctcatctgtaaagtgggaatgatggcacctggtacccacttgattggctgttgcaaacatgaaaccagatgggcctgtaaatcacagggcactcggccgccatcaccatcatcatcatcaacatcatcatcctcatcatcatggccccagctcatccatctttgttgccttctccacccccatcttccatccttggagaactgtgcctcttgaattggcctcgtgacctagtaaagatcataacaaagacgcctaagttggtctcaaggcaccctccttactacccaccaactgagggaggattctcgcctagtcccagcaactggccccggggaggaagtacccttcccagtcctggcacgtctccagcagtgctggctgacggcagactacccttgaagctcagttactgcatttgtggagaggggtgaaacccctgctccagcccaggggccatctgagatcacacccccaaccccaaggccagggtggatctccctgcttggccctggggtggtccctgggcagatgagagggtccttctgcctgagcctctgaggctgccctcactgcagagctcgtggtcaaggggtgggtgggcaggttggatcccctcaagggcacaggggttagagtcttagagacttagggtgagggacatggagagtgatgggtttctgggaccctgagctggccctggcaaggcccacagggaaagctgtggagcgcagtcatctccgtggcaactggcctcatcgtccttgtcctggcttgggggccgcacgccttcccttccctttcaccggctggagtcgctttcttcagaggtaaccatggcaacccctttgtttctgaggcctgcccgccctcctccccgttctctcttcaggagaggctcagccagctccttcctggtcccggcacgtctctagtggcgccgactgacagtggcccaccagtgagtggggccagcccctggggtgggggagaacggccctgctgggcccagagatgtggcctgggccccacccctgccacagaggccacgttcattggctcactcatgccctgaaatttatagagagtacccacgtctgccacggggccacagatggggcaaaggcctgtccctgcctccatggccctgctaggggcagcctggaagtggggagacaaggcctgaggagggggtgcagaggcccaacgggggctggctttgctgcaggacgcactgcggggtcacgggtcatctgccagagctctcaaggccacaggaagcccaggactcttggctttacctcaaatgggctgaagcagaaacaagcatgtggttcacgtaactgaaaagtcaaggaaaggacctgctgaggtgcagcagggtccacgtgacccggccgtggttgctccggctttcctctgggctggcttcattctcgtgcagccctgttctcgggtagtgagatgtggaagactggccccttccctctctcacctaacccagctctggagaggtctgtgggcagatgggagagtcatttgacttcagcctcccctccggtctgaactctgaccctacagcaaaagtcccaggactgagcctctttggctagaactgggtcacaggctgacccctaaaccaactgctgtgactatgtagccagcctggtttatgccactccactcacctcaaaccagacccatgacttcaatgagatgttgacaggggaaccctggtttgcagatgaaactgagtgatcacagactcagagaggttaattaatttgtccaaatccacacagctggtaaagaatgcaagctccaggtctgattccagaacttctgggcttaaccctggagccactgtaggtcagtgggagtccaaagggttttaagtatggtggtgaaacggtcggggatgcagctggaggggtaaattggcgctggattttggttggcggtgaatggcatgcaaaggaggtggacgatattcaggatttggtaggacagtggaagcagctacgccccagctatcgcacggtccccagcatttgtaggaaaaagcccccagggctttgggtagcctcgcaggcccgcactgccgccaggacgcagtgcacctgagggcggagcacccacgccccgggccacctgactcactgtttgtcaactctgctctctgcagccacgccctttcctccttgcctccctccccttttggctcaggggcggcataaccccgcctctctcctgctgtgactggctgtccttgccgtcactccgctgcgtgggcggggctctgagggggcacaggtagaggcccttcgcgaagggattagcatagtcccaccccccggcgcgagcctcgggccgggcgctgattgggcaggcagcggccgacgcggcggcgccgggcgcagcgagtggcgggcgcgggctgtcagtcggcgaggcggcgggccgcacttccgcctcggtgtcagtgggtcgcgggcctacggggcgggggcggggcggcagtgagctcggccggcaaccgagggacccgcgtccaggtgagtggcccccgccgccgccacgcgaaggcccgggaccccggcgagctgcggggcctgggccgcgggctggggctggagccggggcggggaggggagggcgggccgggcaggacccgggtccgcaggccgcctccagccccggccccggccccggcctcgacccccactgggaggcgcgcccggcctaggccgcagcctggcgccccggggaaactttgggaggaaagttccggccgggcgtggggcctgggcctgggtcccgcggcccccgcacccttccccctgcggtcgcccggcaactgcgatcccgggacccccggcccggcccccccgagatccccagcccccctgctgccccgctgagcaggaagtggggacgggcgcacctgctcgcggcctcgccctctctcaccacctcaccgggaacagggaaggatttcgtgcgcatttagggcgatcctgtaggtgaggagggcgagttccgccgggaagaagggcagggagacgcagtcccactccgaccctggccttcttgtcccgcaggcctgtgtgcacgtcgtcccggggagggtgcccgcgagcccttgtccgttcccctgggctctgtttttgtttttaatttataaatcttagcagactacacacggttgagaacttgctacctaaaacctatctttggtaatgtaattttaagaggttccttctttcgccagttatattttggtactcagaagaatacgtctttagactttccaagtttataagcccagaccaagactgttaggtcgtcacagcacctcagcctccccgcttcatgggaggaccggcgacgaggcagtgggtgtcggggtgttgcaggctctcctggggtgagggtcacctcccaggggcgtttctatctgaaccgtcctctaggacaggccctggcctagcctggctccggcagctttgggatgactgcccggaacacctggagaaggggtcccattcggtttggttggatagacgtttctcgaatgcctgctgtgggcctggctgggtgctgtgcggccttcccaccagctggatgtgtggtgaggacagcggagagttgaggagcccggaactggtgcaggggccacatgctgggaagccacggccgtccctgctgcccttcctaactcgtgcccatggcctcttttctggctgtcagcctcaactccttcatccggacatgtagcactttgctgataagagaagcaaacgagatcattttcttgttttatgttttgagatggagtctcgctttgttgcccaggctggagtgcagtggtgcgatcttgactcactgccacctccgtctcccggcttcaagccattctcctgccttagcctcccatctagctgggaccacaggcgccggccaccacgcccgcctaatttttttatttttagtagagatggggttttaccatgttggccaggctggtctcgaactcctaacctcaagggatccgcctgcctcagcctcccaaagtgctaggattccaggtgcgagccaccgcgccctgccatgaaatcattttctaccacagtctctgacacctagtgcgcaccccggaatgccagttaccttccccttgttgaggacaggaactttgtcggtggcacttcctccctgcccagcccagtgcctgccacagtgtcgtcttttagaatgtggcaatgagtgagtgagtgactgagtctccctcatagaatttaccctgttttcttcatgtgtccatctattaatgacagctcttaccccagcagacgataatatttaataatgattgttccaggactgttacgagcatgtcgtattcactttctttgtgtgatcttcacaacagtccactgggcaggtactgacattatccttagttcattcatgaggaagctaaggaacagagaggttaagtaacttacctaaaccacacagcagtaaattatgaaatatggatttgaacccaggctccagggttcacactcttaaacactaccctgtactgccttttaatatcaagattttcatttaacattttcgtttagaatattctaatcatgctgcattactctgtgtcagaatttcgggattttgctacatatagaactaatagactttcttttttgtgagcctgagtgtttacaaagccatttcattttttctgaaataaagtaatttaccgtttgaccattcaggattttgccagaataccttccctgccacccagctcctttgttactggcagattcagtggtggtctctgtgtgaagagggaggactgaggggcatgggtgctgacaggcgtacagtccagactctgaggtctccgttctgagttcagttccaggggacttcacacactgccttagagtacacacgtaggacatttttcttccacgcctcgagtgcgttgagagggtcagactctgctgtgttccacatgttaatgagaggtgctgtttgaatgtgaaaaaaatgccacttgactttcatcccagtgtctctcctctgtgccgtccaggagatgccagcagatgggtcttggaatttttttttttttgagatggagtctcgctctgtcgcccaggctggagtgcagtggcgcgaactcggctcactgcaaacgcgaactcagctcactgcaagctctgcctcccgggttcacaccattctcctgcctcagcctcccaagtagctgggactacaggcgcccgccaccacacctggctaattttgggtcttggatttgtcattaaagcttgctcgacttttaaagttttagtacattcagccaattacaaaagtgacattttgtataagggaattgttgacacattttaggttcttatgctgtcttcaagcagggaagctgccatctcctcaaggtgatttctttaatgtccccatgcaagccatgtcttgtctggccgtgcaggcacagctggcgccgtgccttcctgagtcacagcatctttgcgaaggtggtgcgccagaccagggctcttgggtcctgggtgggttcccactggctcctgccttcagtgtctttgcctgtaagacggattactatgtggaatctgtgaaaatataacatcaagtgtctgatacgttgtgggtgcctgggccgcccttggctccaacacctgctgaagctggagcctctcagcagtgcagcagtcacaccctcaggtgtcccgggatctttgggtgtgggctgattttctcctagtcattgtcatacttcctgtttgggtgttgacatttcgtttagtgtttagcacagattgtcaggtacgaggtttaattccaatatgtagtacattttcaggttgatttataaccttatctacactgaaaggaagtcagtatttgaacatgactgattattaaaaaggaccgaagtcctgagttaatatggtgggttctggtttgatagtttaaatgcactttccacatatgctagttgatttgtaaatctgctgtcatttttgctttttcagagtgttcttgctagtgagtttcaggcatggtgtcccggcctctcaggctgctggtttgggctagggtcccactgtggaagcgtggtggtgtcccggcccacctctgcagctcttgataataaaagcatctgttaaatagctcacagcactgtttgcgtgaactttttggcacttctttccttttccttccagattcagaaaagaacttgggatcattcagcagaatgtcacagcatccacattctttccgctggagcttctgctgatgcaaatcctgtgacctctgagttgagctgagtggtggaagtgagcttttataagggactggatctgagactcgtgcctgatgtttgtggctgtttctctttgcttgccttctgttttcagtggaacactcgcttgatgtattttgagaaacaaactctgggatcagtcctgttgagctagtggctggctccatagtttggggcctgaagaggttcccgcaccctcagggcttgtggcggtcatcaggcctctctcctgggtgtaaggtgtgtacttctcacctgcgcactgagggcctgggggctgtggccccgacgctgaggcaagtcaggggtgggaagggtctgaggggctcttggctgagcagacactgagcacatttctttatcaaaggcgctgggactgcaaccttcaggggtgcccagagagcgcctgttgtgggctcatacggggagttcttggaggagcaccaggcagggaggactgtagtgtgtagggagttgtgtggagttttggttccagaaaagacggaggcagctgtagaggaaggaggactatggtgtggaagtgagtgcctgtgctttgtactgaataaacctaaggctgatccaaggctgatcgtgagaaagagccccctgtaacctgggaccttgtgccactgtgctcggccagagagcaacttccattattgccttaaaactagggggactgtgattcagtgacatttcggtgactccgataatgacggcaggtgtcaggtgcgcacagggcgtggggctaccctcttactgtgaaagaggacacgggctgcgtctgtggtggcgagctcctgcgagtgccctggctctggcttggcctctcttgatgatgtagcagagctgggagtctcgctgtaatcatcacccgtcttccaagtaagtctcacctgtgggaaatgctggaacacctgagcggaagcagagccagggcagtgcctgagctggggccaggggaggggtcccagtgcagaggtgcccgaggagccctagcgcctgccccgcagcccctgccccgcagcgcctgccccgcagcgcctgcccggcagctccgcctcttcagtggctcggctgtcagggtagaaggctcctgggttaacatcatggagttttcacccctgcttctcatcagaaaagctgggggaactttttaaaaagtgtgggttcaaggcccagccccagcttcactgagcctgggtttcccgggaggggcccaggaagagatgtgtttaacaagctcgggagggtctggggtgggtcctcagcggggagtccaagtgctggaggcccacggtggggtcaggacccttttttagatcaaggacccctttgagaacttcatgaatatgaataatgtgggtcattattctggggaaaaaaatgaacgaaaaattttttttcctgtttttttaaattttttaattaaaaaaaaattttttttgcagagggtaggggggttagagattggtggttttccctgaccttggtttgaagccctgcctgtaggtgctcaggaagcacagttggcagccacgtgggcaggtctgatgttagggtgacaggtttctcagcacagtggaccccattagggctgcacaggatgaagatgggcacgatggtgaggagggcctggagctgaggccacagagaaggaggcggccagagggcaaggacgcactccagcaagccagccactccttggctgggcaggtgccctggggaaggccgggagccctgcaggacaacagcctctcacctgggtcactcacttccctttgctgtcttaattttcctcccactccctcaccgcgtcctccgcctgctgtggcccttgctgggttgtgagatgtgggtacaaggtgtctccttctcctctagctgcagccgcaggctgggctcctctcggggccgttggttttgatcatcagagatacacagcggcggcgggtcgggggctggctggactgctgctgcccttggagtgctctccctgccctccggcatggctttctgagagcagggcgcccgtgagctgtggggcatgcgccctgtccattgccttcccacccagtctcgtgggccgcattggaacagctttttattgtgttgcataaggagaaggttgattaaaacacatgtttttgtacggaagcgcttgcattcatcttgtgtgtttggaaatacatcgtactgcattacaaggtaatgttcctcgaggtgcgtggtgtatttttggcaattaatattccacaggaagcagttaagtcagcgacaagacttgagggagttgactgtggtgagtggggcgctaggctccgcttccgggacgtcgggccacactggccgcgaggcccagtgggaaggtttgccactccccacagctgcttcttgggaccaagccgggctcacctttgcctgcctctcaaggtcaccctcttggcatggagaatggtaaacagtgggggtgctgctgtctgcacagtgggagaggttcacctgcctttctcagtgtagaaacttcctgcgtgaattctggactgatgcagagtcctcatgtgcacctggcaagtttgcctggctggcacgcgtagcacagggccttcccgagtcagggttgagccattcgtgtgtccacgctggtgtcttaggataaagggctgaaatctgttctttttttttttttttgagacggtgtcttgcctctgtcgcccaggctgaagtgcagtggcgcgatctcggctcactgcaacctccgcctcatgggttcaagtgattcttgtgcctcagccttctgagtagctgggactacaggcatgtgccacctgtaatttttttgtatttttagtagagatggggttttgccatgttgcccagctggtcttgagctcctgacctcaagtgatctgcctgccgtggcctcccaaagtgctgggatgacaggcgtgagccaccgcgcccggcctgaaacctgttcttcagctaaggcgtgttacattctgtgtggtgttagggagctggtttgtgatgagccacgtagagccccacgctaagaagaaccatacaggcctgaagaaggcggagaggttgttcaggttaaaaagcgcagacctagagccagctggttctgtgctcagaagggctgtctcctggagcttctgatgcagttggacttaaccttatttggctaaaggatcaagaaccagtgttcaataaaggtcactcttgattccatcccattgccaccaaaacacagtgcatttaagggcaaaggcctgagcggccagtcgtacgtgcctcactcgtgacgggctgcagatggtgacgaggacagacagccgtgcacataccccttgttaaaaaaggtcattgttgtgaatggcatatgacttgtttatttggttctaaatttatacaaaatctgtaaaaataaccgttaagcttttacaatgacaggaatattaaggcttgatttttttcctcgacaattggcagaaggcgtgtttcagtgagcacagacggagcaatccagggaggtctgggaaggaggaatggggcctggcctggcggtgtccttgacggccctccatcgttgtggggttggtgtttgagaggtagctgtggcgcggggccggctgccattcccgcgtctcctcgcagaggcctggacctgcgcctggggctggcaaagccctctgctctcgctgctgccgccgcctccatcttcctccaccctctggtggggctggtcacaggcagggcatggtcccatgatggctcagccccatggggccccgggacgctgtgtccaggatgggcgccactgccgtgggtggctgttgaagtgaagtcaattcagctgattagcatccagcattcagttctccctcacgtttcaagtgcttgtagccacctgtggcccatagggacgacactggacagatgacatttccagtgccatgggagagtctaagctcagctctgaagctgtgaaatgttgagtctttgttttagttaagttttgtttttttgcaaaagaaacgagattgtggcctggtggccagctgggtgtcagtggggtgagggcttctaggcgtccgggtgatgcatgggctgagtttgcaaagtggatgtgtcaaggctgaaatgctagctgagaagcattgcccacgctaggcttggacacgcagggagggatgaggtgtcagagaggccctgactggtcactcctgccccagggcttagaaggtgctgggtgaagagagctgcgcccctgtccctcagcccctgcccctccccctcagtgccacacggaggtgcaggcatctcacaccaggttctccctgggtccgttcatgtcacagcaggctttgtcttgctgtccatgatttcatgttcccatcctccagccttgatccgggagacctttctgttctttaatttccacagagagctaattctgtccttaaactttgtgactctgatgctcgtaggtgacacttgtttcccttcctggtgctctggcaacctcgcagtgtcatggtggcatctttccaagcatttgagtggccaggttaggccctgccaggtcgccgactgctctggggaaggagaagtcctgcagggatgtgacagtggctttggtttgctccttggccggccccagcctgacctagttctgctctgcactgtggttgggctcacgtgttagccttgaccttgagcggatggcaggtgctcttcagtgcacgatgctgcaccgggaacttcgcttggccctggaagctggtttgatgtgcacgtcggcttgagtgagtgcagggatggctgagcttgcctcttggcttaggcactgaagatcttcctgtgggtcctctggggtcgcttgctctgtggttgtgctggatgtggcctcttgtggagcagaaccaggcctgtggaacccattccctgtgactgccctggcaccttggcttatgattgctgcccccacgccgcagctgcctccctgcgaagctcagcgggaccgcggggactgagggactgtagctccccggccatgcctgaccgcagtgtgatccctacgggaatgagtttgaaagtctctgccagtggctttgacctgtcaggaggaggagcattctttgacctgtcaggaggaggcaggaggaggcaggaggaggagcattctttcaaatggaagtagtgttggatggggtccttagggtcctttctttctttctttttttttttttttgagctggagtctcgctctgtcgcccaggctggagtgcagtggtgcaatctcagctcactgcaatctcctcctcaggttcaagctattctcctgcctcagcctccctagtagctgggactacaggcacctgccaccatgtccggctaatttttgtatttttagtagagatggagtttcaccatattggccaggctggtctcgaactcctgaccttgtgatccgcccacctcggcctcccaaagtgctgggattacaggtgtgagccactacgcccggccccttagggtcctttctaagacagaaccccatcgttgttaatagtgggaacgttttccctttcagcaaaataccacataaggctctgtgcacagttgtttatttgttagtgctgcttgctgatgtatttttaaattatgaaataaaacttatattttctctcttttctttttttttcttttttcttttcttttctttttttttttttttttgtgacagggtctcgctctgttgcccaggctggagtgcaatggctaaatcttggctcattgcaacctctgcctcccaggttcaagcgattctcccacctcagcctcctgggtagctgagattaaaagtgcacgccaccatgcctggctaatttttgtatattttggtagagatggggtttcaccatgttggccaggctggtctcgaactcctgacctcaggtgatccgtccacctcggcctcccaaagtgctgggactgtaggcatgagccatcgtgtctgggcagaactgtatgaacttagaattgatgtttaacctcagaagtgattttagaatctttttgtgatcagtgcactctctgtgtccagcatgtccggggtgccctgcctgtttctgatggacagagtaacaacatgtaattgaacttccagcaggtcgcccgtggtggtcagcaccggatccccagtctcgttcaccaacttcctgaactgtcagatctgctttatttatttatttatttatttatttattttttaagagacagggtcttgttctgttgccctctctggagtgcagtggagcaatcatagctcactgcagcctccaacacctggggtcaagcagtccttctgccttagtctcctaagtagctgggacttataggcacgtgccactgtgcccagctaatttattttattttgtttttttgtacagacagtatctcactgtgttgctcaggctggtcttaaactcctgggctcaagccatctgccaccttggcttcccaaggtattggggttatagatgtgagccaccgtgcagggcccacatctgagaaaaacataaagatgggtttgtacgacttgagtccaagtcttcataccagtggtaggacattttgagatcctggtgggacggggacagcacctttaagaaagtgtgctggggtccttttcaagggactggtgagttccctgggctaggggaactgagactcactggggcctgcagggatggcgtccttggggccaaggaagtgccccccaaccccccaaaaaaaaaatctcactggagaaggacaaagggcaagaggccagcagagatgcccagcacagactcaggccccagggtttttctctagaagtagaaaagggagaagttgaacagaaagagccccttaaaacagacagaaaaccccagcaaagtttgttcctgaaatactctctctggggattgttttctgagtgcaaagtgagatctgcgcgtggaagaacatattcaggaaataaactctgccttcctaatgctttttcttaaacatttaactttctgtatattcctcaactttgatactcaattatgaagcctaacttttgctttttaaaattatttttgctttttaaatttttatttatttgttaataaaataaacagcctctgtcgcccaggctggagtgcagtggcgcgatctcggcttactgcaacctccgcctcccaggttcaagcaattctcctgcctcagcctcccgagtagctgggattacaggcatgggccaccacgcctggctaattttgtatttttagtagagaaggggtattctccatgttggtcaggctggtctgaactcccgacctcaggtgatccacccgcctcagcctcccaaagtgctgggattacaggcctgagccaccacacctggccccacccaggcctctgagaagtccaggggtgggcagatgggagggaggaaggactgaggacctggctggggcaggcgctcctcgaccccatggggccatctgtgcttcccagcacaccctggtcctcctgtcttttctccctgcccccaaggctcactctgagctcagctccagggttgcccccttaggaacttgcccaagaagggccctcctgggagcaccttcgtgaccggcttcatgagggcgggaccaccacagttccacctcaaggcctggcaccaggtaggctctctgtgagtgtttgttgaatgaatgagtaggatcatagttgtcttgcatagtcatctgtatagttgggtagtagtatgggctctggataaggcctcttcatttttctgggccttggtaagtgtagaaggagacacagggtgtggtgcctgttatggcaactccttcaggagcgaccgggaggctgtgttggaattcactgtcgcacatgcagatgtgggggtctgagggcactgtgacctctgggtgtccctttggttgttgaccggaaagccctccccaggtgggtcttcagtcttggttggaccacacggcacaaacacacagtagcaggcgacatcggtgtctcagttgtccagctaagcttgtgtctggcatcttaatcctcattttaaagatttcccataagctgtgattgatttacctttgacattagacttttgttataggcaggggagcattttaaaaaaggctagcgggccaggtgcagtggctcacatctggagtcccagcaccttgggaggctgattcgggaggatcacttgagtccaggagttcagcactagtctgggcaaaatagagagaccctgtccctacaagcagttttttaaacaattagccgggtatgatggtgtacgcctgtggtcccagctactcaggaggcgggggtggaaggatggcttgggtgctggaggtcaaggctgcagtgagcggcgattgtgccgctgatgtcagcctagatgacagagcaagaccctgtctccaaaaataaataaataaataaataaataaacaagcaaaagggagaataaaatggtttctaattctaacttgccttctattctgggaggcttttcacatagtgcagagcaatagattttttttttttttttttttttttgagacggagtctcactctgttgcccaggctggagtgcagtggtgcgatctcggctcaccgcaagctctgcctcctgggttcacgccattctcctgcctcagcctcctgagtagctgggactacaggcgcctgccactgcgccggccaccacgcccggctaattttttgttttttagtagagacagggtttcactgtgttagccaggatggtctcgatttcctgacctcttgatccacccgccttggcctcgcaaagtgctgggattacagacaggcgtgagccaccacgcccggacaattttttttttttagggttctctcaaaaagatattcatactatcgtgacttttttttttttttttttaagacagatttttgctcttgttgcccaggctggagtgcagtagtgcaatctcggctcactgcaacctctgcctcctgggttcaagtgattctcctgcctcggcctcccgagtagctggtattacaggcatgcgccaccatgtctggctaattttgtatttttagtagagatggggtttttccatgttggtcaggctggtcttgaactcctgacctcaggtgatccgcctgcctcggcctcccaaagtgctgggattacaggcatgagccactgcgcctggcctgtcgtgacatcttaaaaatgagcaggaatcctcctaccatcagatactcactgtgtttagatttccactgtcttataaatgtctccatgaaatcctgtctgcctgtgtgtaggccttgtttgcatcctgtttcaagcgtcattttaattggtatgcctttttttttttttttttttttttttttttttctggagacagggtcttgctctgtcactcaggctagagtgcagtgatgcaaccatggctcactgcaaccttgatgtcccaggctcgagtgatccttccacttcagcctcctgtgtagctgggaccataggtgggcgcaccaccacacccgactaatttttgtgtattttgtagagatgaggttttgcaatgttgcccaggctgatatccaacccctgggctcaagcgatccacctgcctcagcctcccaaagtgctgagtttacaagcgggaaccactgcacctggccagtatgtcttttttttaaagacagcttttttgaggtataattggcatataatcaattgcacacatgtaacatgtacgataggttttgacacgcatgtgcacccgtgaaaacatcaccataatcaagatggtgagaagccttccctctccttctctctttctgtctttgtaattgatttgttggagagactgggttggtcgtgcatgggttttgctaactgcacccccacgttcgcaggtagtcgaacatggtgtgcccacgcctaagaagtggctgctcagtcaaagtcacgaggtttcctttctcctcccgggcgcctcctttttcaatgtggttgattttctgcagaggccagctctgctgggcgaggtgccaggggtccgggtgctgctgctgagtcgccgtggtgtggcctctggtctctgtacttccctaggttgggaagtgtgttaggctgttcctgggttgctataaagaaatacctgagactgggtaattgataaggaaaggtcgtttaattaggtcgcggttctgctctacgggaaacatggcgctggcatctgctcagcctctgaggaggcctcagggagcttttactcgtggtggaaggcgaagcgggtgcaggcgcctcacatggcgcgaggaggagtgagagagacgcctttaaagaagcagatctcatgggcactcatccttgcccaggaccaggaggacagcaccaagccgtgagggatccactcccatggctcaaacacctcccatcaggcctgcatccaacaccggggatcacatctcaacaggaggtttggtggtggggacacatccagaccatgtcagtagataaagctagaaactggacaaacctgggctcagtgttccgggcaaaactgcttcagcagtggcagtgtcatctctccccgggaggcacccaaggccgtctctcggggttcagtgcctggatgtgtgaattctccagtgtcgtctaatggtgatggtcacgcacctgtgtgccttgttcatccatttgctgggatgcttccataaagcgcaatttcctcacctgttacctggcgacagtggcacagcagtgtgtgtagggaaggcaggatgctatctccttgattgccagtttcaaaataacttgtgggcttactggcatcatccaccatgaccagttaatctcctttttaggatcttaggaactctggacttgaatgtattcaccgtgtttcagccttttcccatgtactggtgctcagattgtctcctctttcttgtgggagcttctgtaggttcatcctgagtcattcggtgagagcccctggcgtagcctgtgttgtgctgctacagcagtgccacaggctgggcagtttagaatgagcagcaatgtgcaggctcctcgttctggagtctggaagtccagtccaaggtgctggtgtctgctgagggctttcttgctgtcatctcatggcagaaggtggaagggcaagagaggagggaagagagcgggagagagagaggagagagggaaagggagggagaaggagggggaggcaaagggagggggagagagcacactaaagggggccaaactcgcccttttatttatttatttatttatttttgagatggggtttcactcttgttgcccaggctggagtgcaggggcgtgatcttggctcactgcaacctctgcctcccgggttcaagcgattcacctgtctcagcctcccaagtagctgggattataggcacttgtcaccatgcctgggctaattttttttgaatttttttagtaaagatggggtttcatcatgttggccaggctggtctggaactcttgacctcaggtgatccgcccacctcagcctcctaaactgttgggattacaggcgtgagccaacacgcccggccgactcacccttttataacagacccttttataaaacagcattaagccattcctgagggcagagccctcacagtcccaccacctctcaaaggccccacatcctaacattgtcacatggcagtcagatctcagcatgtgtttggagggacgcacattccaactctacaccccagtctttctgggcaggcagcttccttgctaccatggcaagaggagcccagtcctggattcagccgcgtctcctcaggaagccctggctcctcagtgctctgaagggggaagcacatcgctgcagttgtgaaggggacctgagtgagtgacagcaacttctcccgtctgcaagggcaagcacaccctggccgtgagcagggctgtctgcgccggccttcaggggctgccgcagtctggctgggaaggagggaggaaccgggagacactggagagtctctcaggggacgtggtggctgtcctgttgtctggagggaagcagctgctgctgccccgtgcggctgtggcagggctgcgggatgagccgcttgaggggtcacccagcactgggggccgttctcgccccggcgccctcaccctcagaactgtgcagagagctctgggctggtttttgtatttttgacacaagtaaggatgctgattttggcttccttctcttgtcgttcatcaaacgctgcttttcctgatgggagacactaatgtgcatgagttctagaatattgagctaaggtcgttgtgagaaaatgtaagtttacttcagtttatcctgggagtagctaacttacatagcagcctcaattctctagaattgatgttggtttcaggtagttgtgaaattttagacataattttccatttacttatacagccacttgttccagcctctggtgaatgtttgcaatgattttcagcaaaacttccagagccgtgtttgaacctcggatgctgaacacctcattgaagctcacctgctctctctgactgcccccatgactttttttttttttttttgagatggagtctcgctctgtcgcccaggctggagtgcagtggcgtgatctcggctcactgcaacctctgccttccggattcaagcgattcttctgcctcagcctactgagtagctgggattacaggtgcctgccaccacgcctggctgatttttgtatttatagtagagacagggtttcaccatgttgtccaggctggtctctgaacccctgacctcaagggatccacctcaagggatccaccggcttcggtctcccaaaatgctgggattacaggggtgagccaccacaccctgcgcccatgacttttcccaaattaatgttttattgttttcttacataactgtagataatgcttttaattttattttaattttattttaattatttatttgtttatttatttcgagacagagtctcattttgtcacccaggctgaagtgccgtggcacgatctcagctcactgcgatctctgcctcccgagttcaagagattctcctgcctcaccctcccaagtagctgggactataggcgtgcgccaccacgcctgtataatttttgtatttttagttagagacagggtttcaccgtgttggccaggctggtcccaagctcctggcttcaagtgatccgcccacctcagcctcccaaagtgctgggattacaggcgtgagccaccatgcccagccaataatgctttttagaaacaactcttgttatagggctgaattattggtctgttattcattgattgatcttccgttataaatgctccctctcgtttactttttgaaattatgtttgtgatgtgataatttattttactaatttgcttacatggaatttagattgattttaggatggtgaatgggtatttttaaaatgtttttaaaccgtgaaacttctggaagctaagtatgccaaaatttttttccctttagatcttcagtgtctattggatttttccaagagaaagtttgtaaaattccttacactgtagatgtggatcagatacgatgattcagtagaagagcacatgtcaggggcagtggaggctggctgctgaaggatgaacggagaggaagaattctttgatgccgtcacaggtgagtcaaaagagaaccaactggggacgtactggaagggtgaacgtccctggattcagatgttggacctggcgtttggggtgtaaagatgctcagtaaagcagtgtgtgggtgagcgttcacgatcccaaacacggactgttcagcaaaacctgacatccatctcagaggtgggaaaagccttgactttggctgacagggtttaagtctcccgaagagtttcctggggtgcggatattttcatttgtctcctgagatagccatcttcttcccctatttctgcttcatgatgagaacgttctagatatgatgaccctgtcttgcttggcactgcttgatgcatcccatcagacagcaaacccctgggtctgcagctgcgctcacagccgcagagtgcagttatttttttctttcgcacgatggtttaaagtggcggcatgcagcctgtggtctgaatgaaatcctgtggcctaattgaaaagaatgtgttttggcatccagtcactcaaaaaaagaagaaaatgaagaccgtgttgcagggctcatgggcatgtgacggggcggctagaggaaagggcaggcggggctggcagcttggccttccagagccgccccttctcctggcacagggaagagcctgaaaccctttgagctcgtgtcttgtcaggtcctcatgttcattctccactcttctgtgcctcggagtcagcatctggaattccgcttgttttttctggaaaggaccattgctggtgggaaggggcatcaggagattctccttgatgttcccttgtccttaggcgtcgggatcagaaaggagtggctttggaaatgtggccgcaggccaggaattagtgatgatctttagaagcacttctgcggttactgccgctcaaggatctgtcagggtctctatggccatgccccaaggacacggcgatggctccgttggcacctccagtctgtggccctgccagggtgggtgtgtcaggagggtctctgtggccacaccccgaggatgttgatggctctggtggcgcctccggtccgtggccctgctggagcgggctgattgtcccgaggctgtgctgctcctgtacctgcgctggcagctcaagatggttgacttactcttatccaaaaccccaggagaaggggatgatgcgctccttaccggcttcaaaggctcaatttcgaagtcattttccatgatttcgtagctgaattatctgcagcgtgtttgcctcggatgcactctcagaggagggtccatggagcttgcaactcatccatggtggttctgtgttctctgctgaatcccacacagcggagggattgtcaggctctcacacccttgggctgacctctagtgggatgccacgtctgtcacagagagcgcagccttgaggtccctcctctcctgggagtctcataggatgtcctttttgtctggggtcttggtgtgactgatactttcccgaatacctctggccatttttttttttttttttgagccagagtcttgctttgtcgcccaggctggagtgcagtggcgtgatctcagctcactgcaacctcctcctcacgggttcaagcagttctcctgcctcagcctcccaagtagctgggattacagacgcccaccaccacgcctggctaatttttgtacttttagtagagacggggtttcaccgtgttggccaggctggtctcgaactcctgacctcaggtgatccacctgccttggcctcccaaagtgctgggattacaggtgtcagccactgcgcctggccaactctgagctttttgagtcagtttgctgtgacttcccagggttcccagctgtgtgtgatgtggtactcagatggactccactgttctaggagccacagggtgtgcggggctgtggggcgttgctcctgcatggcaaggcctctccatgtgtccccaaggatgaggtggaagggacagacatctaggtgacaagaattttccccctcagttcttgggcttcaaaacaaataatggaaggaaaaaaccacttcatctctttatgcgatgaaatacccgtgctagaggtagactctcgactccttcaccgcctataatactcatctgactttgtaactctaatttcaaaagtatgtaaactaagcagttattaaatgaatgacttcattaggcatttaatttgtcttaagaatcagtgccattcaaaggaaaggtttggaggacatgaacagtgtgtatgggattaagggctatgaacgcagaggggctaataaaaacaagggtttccgagggagccgacgataggagatctcagcttcctcctttgctcatctgtattttctgtttttctacaataaatgcatgtggtgtcttagaatgttattaggccatccgagtagcgttggctgagtcggaggctgtggtggctgccaggtcttagaatgttattaggccatccatgtagtgttggctgagtcagaggctgcagtggctgcccgggatgtgctgctttattcttcggggtgggggcaggtcctgccccacggaattcccttaagtagggaatgtttttaagataacttcagagtgagaagttagagatgttgattttgggacagagagcaaaacatgagagatggcagggtatttcagaaactgtgggccatttcaggattcctttttaacccatcctctcaaaatcacgatgtcatccaccccagcactgcctttatggatggactctgctgtgtggaggggcaggacacagcagctttgctttgttcttctggagcctgtggcagactcatctgcgtgtggggtccgaccacagttgtctacctgaccctcccgggcttgtgcccctcacgtggagccctcagaccctggaagcactgggtggttgccggctgctgcaggcccagagcccccatggaataaactcatcgcggggacccagcccccactccacccggctctggagcagaacttggcccttccagcaactcagactgacaggagttgaagggagacgtatgttcctgttccctagttgcccgttctgtcctggggaagggcccaccccaccagggcagcggccggccgttcttctccaggacttttgctccaggagtgcatgcatggctggatctcactcacattctaaagagctccttctccagagtcccccttcatccggagtccactctgagtccagtcacatgtgtggcatttccatgattgttccctatctgggtacagtttagtggtgcctttgcgtgccacgatggtctcccttgaaacactgtcagcaggcgtgtttcagaccaagacgcagaccttggtcacaagccctgagccacaacgggcgcatcgcagccttgggatgggtttgaatccgatagaagtggcccacccagagcatgtaggtcacagattaaaatgatgaaagggttccttctggaagatgaagctcatggcctgggactggacctcaaatcacaagcgtgggaggagcctgggcactggagctcgctgggagcgcgttcttaggagggaagctccgtggcaccctcctgttctctctgtaccgtgtctgcttctggagaaccagagttaattcttccaaatgtgtccgttcacacaactgagctctgtagtcacctgcttgcatagtcagaattcttggaggtaggcttttaaaaaatctttcaggtccagcgaaaatgaccattttcttgtctcgcacaggctttgattctgataactcttctggggaattttcagaggcaaatcagaaagtcacgggaatgattgacttagacaccagcaaaaataataggattgggaaaactggggagaggccctctcaagagaacggaattcagaaacacaggtatgttctctcacgtctgctgtttctaaaatgtgtctgtaatcaccccaaaaatactctgcagggtacccctcagccctcacgagcattgagctggagtggcacccccacagctgtctggcctccccatccggacagcctcctctgtctggccagcaagggttcagagagactccatgcctctcttggctcctggaatccacagatggcaattttttgagcagtgcctttccccatctaagaaatgcctctgttcccctccctgccctcaggagttgctgtgagaggatttggggtgacacaggctttgtcagggcctggcaaacagtacatggcgtcttgatcatcagaccccttgctgatttcctacagatctgcctgcttttccatgggcggccaagttcatcctctgtctcagcggagttctattgcagtgtgttcagctctgacccctacaggacaagaagcgtttaatttccttgttgtagcaagacctcattccctttcctcctcctccacgttcgttttcatgtaggtagagtccagtgacagtggccatcacaagaagtcttcagtccttggctggtcgcggtggctcatgcctgtaatcccagcactttgggaggctgagacaggtggatcacttgagcccaggagttggagaccagcctgggcaacatggcaagaccccactgctagaaaaaaattaaaataattagctgggcatggtggtgcacgcctctggtcccagctacttgggaggctgagtcaggaggatcccttgagcccagaagttcgaggctatggtgagctacgatggcgccgctgcactctagtatgggcaacagagcaacaccctggctcaaaaaataaagggaagaagtcttcagtctttgttgatagaagcacgagccaggcgcagtggctcatgcctataatcccagtcctttggaaggccgaggtgggcggatcatgaggtcaggagattgagaccatcctggccaacatggagaaaccccatctctactaaaatacaaaaaattagctgggcgtggctgtgcgcatctgtagtcccggctactctggaggctgaggcaggggaatcacttgaacccgggaggcagaggttacagtgagccgaggtcacgccgctgcactccagcctgggtgacagagtgagactccatctccaaaaaaaaaaaaaaaaaaaaggcacaaaggcaggacaagtgtcaggtgggacaggcagtggccctggagctggtggcattgcgttgcaggctccaggcacagccgctaatgtgtgtctcagctccagggagctgctccagcctggcctcaggctctccttcgagctgtaggcccacacgcctgcttggtgggtccactctggcacccacatgtgcatctcacctgttgtttgttcgttctctcaccctacagatatgggagcccccacccccgctcctgcattccccgttttctagccctgactctgtggtcgctttaaatgctgttaggtccttcagttcttccatttgctctgcaacatgcccgtctacccaaccacccttgtttccagagtggcctctgcatccctgccttttattcctgttgttgtgcagaggcatttgtgtatatgtgtatttattgtgtttgagacggagtctcactctgtcgcccaggctggagttcagtggcgtgacctcggaaacctctgcctcccaggttcagatgattctcttgcctcagcctcccgagttgctgggattacaggcatgtgccaccatgcctggctaatttttgtatttttagtagcgacagggttccgccgtgttggccaggctagtcttgacctcctcaagtgatccacctgcctcggcctcccaaagtattgtgattaaaggtaggagccaccatgcccagcccagaggcacttttcaaaagacagatctggaccccccccccaccccgtcaccctctgcctaaaactcaggcaggatgaccacatggccggcctcacactcctgctcctacagaactgtgaatggcgccctgttatactagaagaaatgacccagctcggacagtgcaccatgtggtcactcacctcttaggaagaaagccagcaccctcacctgtgccctcaggcctggccccgagccctgttgcctcccgtcccagctgcaggggcctctttcaggtcctcgggtgtgtcagctccctctgctcccttggcctggggcctcttttctcttctttcatgtctgttgttcctacgcatcccatctccatgcagggtcgtatccttgggggatgcgacctgaccttctgcagagccactttcccctcctggtagcacctccgaatcacaaagtattcactgaatgtgtgcacggacgatggcggagcagagctgggtgctggcttccggcagcccgggcctggtactcagcagatgttccttttcttttccaccctgcctcatagctgccatgtcctttccctcctgccccctgacaccagtagtgtgccctgacccagctgccctgacgtggcattcccggggcatagctcgggagcagagcagacaagagctcgtgctttcatcactctggaggtcagagtgttggtgccaaggttctgctgggtgtgaggcaaaacgcccctcaaagcagcttccatgaaatgggagttcagcaggagagccctggggtgtccctggagggctgtgagcagcagggagccccgggcccctactctgcagcaccttctttgcaccctgctctgtggtgtcctgtgtgggtctggcacgcctctccccaaatccaagtttatgtctccattcaggcgctcccctcctagatggagacagtatctcattccagctccacgttcctggtggggagaccagggccccgggtcagtggtcccggttgatgagtggtgagcagtggtgggggtgagggtctcctggtgcaagcatgagggcatgggctccgccttgcagccgactggaagattacctggaaagaaatgctcctcaggaaagcaagcacgtgtttaaagggcggaacagcttttaattcaggtcactcttgctgccctcttacctctgcctgtggtctggccgctgccccagggacccagcaggagcccccagaaggctgtgggctctgcgggcagagggactccctccagctgccaccctgtcctccagctctgagaggaaacaacagcagggccactgcggggccaagactgcagagtcatctttgttgtcatgaccattcccaggaagccctgggaacatgggtgtggaaggcctctaggcagcagtcgtgccctgtgtccctaggcatgccagaatgtagaaatgccaatgtttaggagtaaaaattaaagagaaatcgtcattgagcacagcctccttgagtggtcagagtcctgtgttgaattcacccacacgcaccccttttgtgcttcgcaggacatcgctgccggctcccatgttcagcagaagcgacttcagcgtgtggaccatcctgaagaagtgtgttggcctggtgagtccgggggcccgtgttcacacatggggctgcaccactgactcctgggaaggtattgcagtgctggtggtttaagaaaatgcgctcttggccgggcgcggtggctcacgcctataatctcagcactttgggaggccgaggtgggcggatcacgaggtcaggagatcgagaccatcctggctaacacagtgaaaccccgtctctactaaaaattccaaaaattagctgggcgtggtggagggcgcctgtagtcccagctactcgggaggctgaggcaggagaatggcgtgaacccaggaggcggaggttgcagtgagccgagatcgtgccattgcactccaggctgggtgacaagagtgagattccatctcaaaaaaaaaaaaaaaagaaaaaaaatgcactctcatgtttataaacagcatgagattaagacaataaaacaggaaaagaacaagcaagtcaggggaagaggtgttctgtaggtgaaacgggacataagaaccatcctgcaagcacccatccagccctgtggcctgcgtgaggtgggtggggcttccgtggcaccctccctggccacatgctgagctgcaggaggggtgtcagcctttgtcaggtgctcagggtttgggacagaaaaaccagctgggaatgagcacccagaagttacagactttccctttcatgatctttcctgactgtgagaacccaagctgtgcctcacaggggcggggagtgtcccgtgcctcctgtaccgtgctggttcctgggccagcgcttgatgcctgaaaactcacatggcctgggaatacgtgtcactcttgcccagaccatgtcttctagtgctggtgattttttgcccttatctgttttagtcctttttttttccagagggaacttcactttttcttaactttttattttgaaataattttagacttacggaaaatcacaaaatagcacagagcattcctgtagacccaccacccagctcccctgatgccggcatctctcggaataaccataggtcagtgaccaaagcaagaaatgcatcttagctccacatgtcacttgtatttcctcagtgtccccgatgtcgtttcctgtcccaggaccctcatggcatttgggctcctccacttggtggcagctgctctggtctgttacttagtggacttttccttaatttgggtttgtctgatgttttcttcttagaatgaggttctgtatttttggcacacacagaagtgaggtacccttgccagggccttgtctgaggggctctgtgatagccgcatgtcttgttagtgggactgttaacctgatcacttggtcaagtgtctccactgcaaagttgctgcatttctctttgtaatcaatgttttagggaagacacttggattctgcttgccaattgtagcatccattggtgggttttactgaaatcattctaatggagattttccattctcgttcgttcttctacctttattaattggaattgttctgtaaaggagagctgtcccttctcccctaattatatatttattcagttatttatttgtattagtatgaactcatgagcatgtattttattctgtgagttgaattccagtatagtccttatttacggactataaataattgctcaaagtgttctacctttggtgttgagagttcttctaggttggtttcccccttctgctgaacccccatccttttctgaacacttatttcaggcactaaagaatgctctagttcagcttatattttccctgccttaaccctggaatcagccacttccccagggagcccattcactgggtaatggtgtttagaaaccacaatccagtgctgggtgagctcattgctgctgaggtatcattgcctgcaggccctctcagcagacagcactggaaaatacgagtgtgctaatgctcatgcatacacatctgtatttctgtatatatctgtatgtttcttttaaaataaaccatttgagattttttttctcttttctgcaatgttttttgtacatttttgactatgtggataattcaggtcttgacaaaaatatctgtcttggtatagatgaggaatgtcttttgtgaacttgacaaaccacctaattttgactctcttaaattctgagacaggctgggtgtggtagtagctcatgccctcaggaaagctgagggaagaggattgcttgaggccaggagcttgagaccagagcctgggcaacatagtgagaccccaactctacaaaaaaatttaaaagattagccaggcatggtggcacatgtctgtcatccagttactggggaggctgagacaggaggatggcttgagcccaggagtttgaggctgcagtgaactgtgatttcaccactgtgctccagcctagatgacagagggaaaccttgtctcttaaaaaaaaataaataaagattctaggaccaaaagcatcttttcaacaacatgaagtgatgtatattgcattccctaggtgagggttgtggagagattgaggtgaaagtttcatgtgagcacgtaggactggcaagcatagtagaaaggcgctgggaggggccttgtggggcagctccaccccttacacttcactttgaaacactcccctttggaggctttggtggcactccactctttttactacttctcagcttgtattgaaaaaacacaagcacacttggcaacgtggacagtcccaacatagacagactcagacagtggtgagctcatgtccccatagctggatctgcagtgattggctgtggctcgttctggatccgcagtgattggctgtggctcgttctggatctgcagtgattggctgtggctcgttctggatccgaggtgattggctgtggctcgttctggatccgcagtgattggctgtggctcattctggatctgcagtgacgggctgtggctctttctgtttggtccacaccccccacttctctcctccctcgtattttgaagcaaattccagacatcttttgtttgtaaatatttcttatgtatatttaaagggtaaggattcttttttaatgtgactgtgatattattattatactttagaaaataactttagaaagtcatttaatatcatcagatactcaatctatgttcaaatgtccagtggtctcacgtgttgccctctggtgtttgcagtcctgtgtctggaccttgtttgtgtccctctgtcaggaagcctttttgttgctctttctctgaatttaaaagctgtgggcaggccaggcgtgcgacggctcacgcctataatcactgtcagaggctgaggcgagaggatcgctcgaggctacgggttcagaaccagcccgggcaacaaagtgagatcccatctctacaaaaaagaattagccgggcatggtggcgcatgcctgggctcccagctactcgggtggctgatgtaggaggatcacttgagcctgggaggttgaggctgcagtgactggtgatcacattactacactccagcctgggtgacagagtgagaccctgtctctaacaaacaaacaaagctgtgggcgctcagagtctgggtccactaactcactgggagttgctagttggagctgtgccaacatgatcaccctttattgattgccggggatagttctggatgtcttccagtccacaaattgttccatctttggtcagtgagagtctcttcaaggtggcccggagtcctttacaaaaggagcttcaggcctatcctgtgcgtttactgtttggggtctggcatcatctacttgtccagggagagaaggagaattcaggaccacagccgggctctcaggaggccaccggggtagtcttatttcgaggtctgttcctacagctaggaactgtgtttttgtttgtttcagtgatgcttcaaatttgggccaacaggctccacctaacctctgcggcctcatgtctgcgtctcttttctccctcactgacagtcccagttttctgcagccctggcgaggacagatttagaccggcacgcagttgtgactcactcactttgccccacatacctgtgggaccagctctgctgccgacagtgtctttgctgagacagcacatgtctgtgcctcctgcagttgccacttgtcattgtcttcagggtatatctcaaatgtctgcattattttttatttatttatttttttgagggagtctcgctctgtcgcccaggctagagtgcagtggcgcgatctcagctcactgcaacctctgcctcctgggttcaagcaattctcctgcctcagcctcctgagtagctgggactacaggcgcctgccaccgtgcccggctaatttttttttttttttttttttgtatttttagtagatacggggtttcaccttattggccaggctggtctcaaactcctgaccttgtgatccgcccacctcggcctcccaaagtgttgggattacaagcgtgagccaccgcgcccggccaaatgactgcattttaaaaccacctgggtgcttcttcgctgggtgattgtgccaccaaaggaatgacataggttcatttgtttcatttttgatattgagagatgactttttaaaatttaattttctttttaaattatgggtcctgcatcaaatttatcaagcaaggtatattccaggagagtcagcttcctgtccctgtcccctcctggtgctctctgctttccccacaggtgaccaggagccaagtttagggcatgtctttcatgcgtcacacagctgattctacatgtatcttctccccacttctccccacttctttacataaatgagaggctttctccaccttttaaaattcaatagtatatccatagcaacatgcagtgacttcttaatctatttatttatttattatttctttttagagactgagtcttgctgtgtcgcccagtctggagtgcagtggcaggatcatggctcattgtaacctcaaactcctgggcttaagtgaacctcccacatgagcctctggagtagctgggactacaggaacccaccaccatgcccagctacttttaaaaaattttttggcagtggctcacgcctgtaatcccagcactttaggagtctgaggcaggcggatcacgaagtcaggagttcgagaccagtctggtcaacatagtgaaaccctgtctctactaaaaatacaaaaaattagccgggtgtggcagtgcatgcctgtaatcccagctacttgggaggctgaggcaggcgaatcgcttgaacccaggaggcggagaggttgcactgagccgagatcacaccattgcactgctgcctaggcgacagtgtgagactccaactcaaaaaaaaaaaaaatgtttttttgtagagacggggtctcactttgttgcccaggctggtcttaaactcctggccttaagtgatcctccccgccttggccctgcaaagtgttggaattacaggcgtgagccatctcgcctggccgacttctgaatcttttaatggcgcggcgctccctcacatggctgccacctagcttattggactggcgccctgttgttggacatacgggtcatttctgatctttcatggatccagccgtgcggcagcaaagagccctgcatgtgtgtttggccgaggctctgtgggataggttcctagaagtggggctgctgggtcaggggcaaatacccgtagagtttgctagaagcagcccagtcccctcgtggggctgcatcactgtgcatttccacagcagccggggggctttccctgggtgggagttgcacacagttgcgataccatctctcctctcctgagcaaggcagcgtctcccccatgctcagggctgccaccggccgcacttcccggcctccctggtcccaatctctggccgctgtggactgtggcctcttctagtttaccaggcgtttagagcacgggaggctgttgatcctggtctggaatgtaaattgcaaatgctcccccatctgtctgcttttctgctcattctttcggggcttccttctttctctgccacgtgttcttgcagtgccgagctctgatcacaagggtcacctctcttcctgctttcctcggcagccacattcccttgtgcagtcttggccacacccatgtgccggggctgcctcagttggaatccagttctagcccctcctaagcccacagtccccgtgtgtccagtgccatctggggcctgctcgcccctgcagcagcctgagccgcaggctctgtgcgtctgccctgtgctctcagcctcggtccctgcactcgtccttgacccagtgtctgagcagagcccccctcccagcacggacgctgagttttgggaacctcgcggcccaggcagagcgcgtccttgtggtgctgtgcacaccccgcccaccctccgtccaccctgcgcatgcagtgcctgtggtgtcctgaggccttggtggggccgtcctagtccctggtgcagacgaggagcctgagaggcttagcagctcatgtgtgtgtcagctgggaacccacagcaagtggattccaaagcctgccatgtccctgttgccactagcacctcctcctccactccctcctggcctctctgggtcctctccttgtccctcctggcctctctgggtcctctccttgtccctccctgacctctctgggtcctctccttgtccctctctggcctctctgggtcctctccttgtccctctctggcctctctgggtcctctccttgtccctctctgggtcctctccttgtccctctctggcctctctgggtcctctccttgtccctctctgggtcctctccttgtccctcctggcctctctgggtcctctccttgtccctctctgggtcctctccttgtccctctctggcctctctgggtcctctctgacctctctgggtcctctccttgtccctctctgggtcctctccttgtccctctctgggtcctctccttgtccctctctggcctctctgggtcctctccttgtccctctctggcctctctgggtcctctccttgtccctctctgggtcctctccttgtccctctctggcctctctgggtcctctccttgtccctctctggcctctctgggtcctctccttgtccctctctgggtcctctccttgtccctctctggcctctctgggtcctctccttgtccctctctggcctctctgggtcctctccttgtccctctctgggtcctctccttgtccctctctggcctctctgggtcctctccttgtccctctctggcctctctgggtcctttccttgtccctttctggtctctctggtcctctccttctctccttgtccctctccctctgcctctgctttgcccaccccagaccctgctccttcctgaagagcctgccctgaggtgacagctgtgtttccctggaatgcctactgcccttgggatccctttcctggaagcccggtgggaagagtggcccctgtgggcactcgtccccttggcaccttcccagcttcccccactaagccatgcgccctgccgtccagggcctgggagcagacacctgagactcctttgccaactcggaaggccttaggggaaagccacatggagccatgttatgggaggcctcatttgccaggttcaggtgtgtccgaggcatcctggagggacgggaagccagggactatttttaacggcgtgggtggctctgcctgggaccactactctgtttttttgtttttgagacggagtctggctctgtctcccaggctggagggcaatagcataatatcggctcaccgcaaccttcacctcctgggttcaagcgattctcctgcctcagcctcccgagtagctgggattacaggtgtgcgccaccatgcacagctaatttttgaatttttagtatagacagggtttcgctgtgttggccagactggtcttgaactcctgacctcaagggatccacccgcctcggcctcccagggtgcttggattttaggtgtgagccaccgtgcccagcctgggaccactactctggaagtggggtggagaagatgtggagtaggggagggggcgcaggtgggcccaagagcccttgtggcagtctctgtgtctggaatggggcggtgggctggggaggcagagaggattcaggggtgtcatgccagagacctctgcaggctcagcacagattgtgtgtcaggtctgatggcagctgaggctcacagggcagggccgatggggcagggagtggctcacccatggggggtttgaagatccggttcaaccccagaggctgcggctccatgaagggatgctcagagcaggggcatcgggcagcccagcggtgtcaggaaggcagcagtaaccagcgagtcttccccatctttccaggagctgtccaagatcacgatgccaatcgccttcaacgagcctctgagcttcttgcagcggatcacggagtacatggagcacgtgtacctcatccacagggcctcctgccagccccagcccctggagaggatgcaggtgggccttaggggtgccaggcaggagtttgtcatgaaagtgatgccccttgcatgtctggccacacagtcttggggccccaggcatctgtgaggactcgcacagctccccccagtgttcagtgccatcctgcctggcggtcgtggcatttgtcctgtcaccacaggtgtgtgatgacagaacttgccggaaatgccattgagctctcagtggccccaagagctccctgctgccgcctcctgccgggagactccgcctcttggagctgaaggtggcggtgggctctgcccttgggcttctcttgggtcctgttgcaccaccgcaccccatgtgtgtgcatgtgtgtgactgtgggctgggcacgcacggtggctcatgcctgtaatcccaacacttcgggaggctgaggtggatgaattgctcctggaggttgagaccagctgaggcaacacagtgagaccgcatctctacaaaaattttttaaaacttagccaggtgcagtgttgcatgcctgcaatgccagctacttgggaggctgatgagagaggatcgcttgtgcccaggagctagaggctacagtgagccacgattacgccactgcactccagcctgggtgacagagtgagaccctgtgtctaaaaaataacaaaatacaagtgtgtgactgtgggtgcacataacgtgtgcacgtgtgtgcgcatgcctctgtgaatgagtgcttggggtgtgtgtgttgagtgtgtggccttgtgtgtgcatatcagacggagtggctgacattgctgcagcatctgccagaagggcctggctccgggggtggaaggcagcacccagttccttctttctgtgctgtcgggggagtggcgggtgatgaagggcattccctggaagtcctataatctcagacacactgctcggggaaaactgaaaacgcacacggaacaaatagtgacagaaaccaggtgcccaccgccctccacaagaggccatcttctccagcgcgtttcctaactgaagctgtgcctgtcccccccgtggattatttacagtctgtggctgcttttgctgtttcggctgtggcttcccagtgggagaggaccggcaaaccatttaatccactcttgggagaaacgtatgaattaatcaggtaaggggggaaaggcccatcataaatatcttgtaaatggaattccttggatgacagataagtttgattctttcactagcattgattcctctgctctgagaataaactgtttgaattaagagctcacgaaagcgtttggatgctgtaggcgagatgtttcacacacacggggtgttgtgctagcgtgccacggcgtctgagtgagtgtaaagcgctggcaatgagatattttagtgtgttcgactcaagcgtggagatagcgcgcactgtagacgcttccgtgtgtgtgtgcgacgtctgtgaaatgtgtaggattgttgtgagcttcaccgaaaatggaaataggtactaatgagcaaaactaggctgtttcactaaagcatttagtgaacgctattgaaaaagcaggtaaatccaaacacaggaatgattgcaaagaggagcttcactcccaaggccacgtttgccaccacagcctccccagagttttaggaagggtcagacggctctggccaagggagagttaaccagaccacgcctcatctccagacatccctgaaacttcttcctatggaactttcttctaggcagcgttgccatcccttcctagagtctccccagcttccctcctgtctctggtggccctcacctcacagacgtgagactgactccaagtcctagaactctgaccccagaggtccagccgggccccagatccgttgtttgtggctgggcctctggaaggactggttggggttctcttcacccacctggttgccctggggactgctgtggttattcacagaatcatcctgggattctgcccaggtgacagtgcccacccacaccaacaaatgaagtcaaaagcaggccagaccatggcatgtatgtggcagtgtggtaattcctcagccattgagcagcctggctggggctccggggagctgtggatgagagggatgtgggtggcttccttcagggccgtttggtgatgtctaaaatgatttttattccactgcccgtggaccccgtcattctcttgtagatgcatgcaggtgcccatgggcagatgtgtagggagagtcagcagagcacagttcagctgctgtctctgtgacagggctaagctgtggttctgaaggagggaggggcagggcactctcgctgcacccttcagtcttccgactgtcgaggtagcccagcacacagagctcactctgggaagaaggagcttgctggtgggacacccttcactcttctgactgtcagtggagcccagcacacagagctcgctccgcctgcctggggagaaggagctggaggggcgtgggtggttatctagacaagtctgctgtgcagaatgcaagctgtttgccacaggctgctgggctgcacgcctccctgcccaggaacagagtgcagacgggagggaaggcgggctcctttatcatcttgttttattatttttctgtgaaaaagggagttgagccaaaacaattagcctcttatttggattctgggttagttgagattctgttgggttattttattatgaagtctgtttgtttttttaattacgagagagtgctctttatagaaaatgtgtaacattgagaaaggtagaaaagatgaatcaggcataatcccatacaagacaatagctggctgggctcacgcctggaatacctgcaactcaggaggcgaggcaggagcatcacttgagcccaggagttcagttacagtgaccgtgccactgaactctaacctggactacagagccagaccgtgtctctttaaaaaaaatgagaggaactgtcagcattttgttagactttcttttgtgtgtgtttcaaaatatgataatttaatttgtatccctttttaacatgtcataattttcctgtgacattaaaaactttttctaaattagagtgtttcatcgattctaagacgccttgttcacgtggcagcacttctacatgtcagtttcttgttcctttttttttttttgagacgaggtctcactctgtcgcccaggctgaagttcagtgacatgatcacggctcactgtagcctcgacctcctgccttaacctcctggatatgatcacagctcactgtagcctcgacctcctgggctcaagttatcttcccacctcagcctcccaagtagctggaactacaggcgtgcgccaccatgcccagctaatttttgtattttcagtagagacagggttttgctgtgttgcccaggctgctcttgaactcctgagctcaagtgatctgcctccctcagcctcccaaagtgctaggattacaggtgtgagcctctgtgcccagtccaagtcatagtttcatttgcagcatttttttctttctttcataaaataatggtgtgcagtgcaatgaatggcatcttgggttccaagaagtgcagttcctttgaaacttaaggccgctgttttggggccctttattgtattttatgtgttattaatgattgagaatttttttttttttttgagacggaatctccattggttgcccaggctggagggcagtggcatgatctccactcgctgcaacctccgcctgctggttcaagcaattctcctgattctccgcctcagcttcctgagtagttgggattacaggtgcacgccaccaggcccggctaattttcgtgttttcagtagagacagggtttcaccttgttggccaggctggtgtcgaactcccaacctcaggtgatctgcccaccttggcctcccaaagtgctgggattacaggcgtgagccaccacgcctggccatgattgagatttttatcaatagtgagcaaatggttgtgggatttggtttgcttcagatggactcttttccagtgtgtaaagagtttaaaagtgcgtgcccatgtttgtcctagaaggtgtgtcagcactgcctgtcagaccattttgggaggatgcgttgttagtagtacaagctttcctgcacttctgtatataaatcactatgcagtttggagaagcaacataaatgtcacagcttcaaattctaatctgttcctggctcatcctggctgggtcagctgctggtccttacccacatgctgcccgtgcgtgaatgccaactttgtgttttttgtctgatttagaagttggctggcactgggcagccgagcacctgttctcaagatgtcattgcctttgagcaagtaggactagtttggacagagtgtggcgtggtgacagcagggtccagcaggcaactgtcggtcttggcacaagctgcagggagcagccctgcttctgcttctgggaaaggggaggctgaggcctggacaagggaaagactggccacgagaaccacttgtgagggagtcttctgttctgaattcatgtagagtgtgcttccttttctagatatttctcttgagcagtattcctgttgctgcctgccagccttctcgtcctctggtcagcgtgctgtgccactgtcagaggcattgacgggattggctcttaaaaaattattaaaatgtcttgaaaaagataaatcaggccgggcgtggtggctcacgcctgtaatcccagcactttgagaggttgaggtaggcagattgcctgaggtcaggagttcgagactagcctggccgacatggtgaaacctcgtttctgctaaaaaatacaaaaaattagccgggcgtggtggcgggtgcctgtaatcccagctactcgggaggctgaggctggagaatcacttgaacctggaggcggaggttgcagtgagccgagatcacgccactgcactccagcctgggcgacagagattttgagattccatctcaaaaaaagaaaaagaaaaagataaatcagaagaggaaagaagttctagatgatagagaagaagccttgtgggtgaaaggaatgcaagccgcctgggctgggtagagcggggcgtgccgccagcacccttccccaggggctgcacccggggccggagctcctgctgcacagccagaagcaagctatgcaccttcgcaacgccgagacacgtcgtctgtcatgagttcacttccagatcgtccttgccagtgtctgccatgtgctgtgtgtctgtgagaccctggcagtctgtcaggttaggggccatggacgtggaccaagtcctttcctgataccctggatccctacagatcccttgttatagctaaaaatacacattcttttctcagacaagtattcattttgtaaattacataccttggtagtcaaccttttaaaatctaatttttcaactttctttcttctgtaatgattggaaattctgattccagttaagttggtaattatgtggtttagcttttctaatttttaatgactacaactgtaggtgtattcacagttccggaacaattaaaagctgacattttgattgaaaaagagagtacactaaaaatcctgttcctggacaggagtattttggggtataagccattccatctcggaaatttcaggggccttgtagaaagacaaggaaggggcacccccttcagaaagggtttagggtcctgagttcctgggcaatgggagtccctcggggttgagggtttggagtcagaggtgtgtaaggattgcttctccacctgcgtctctgggtacctctagccagacactgctgtggctcaggtggagagcaagcggggcatcagggtggaggcctctcctgcaccattgcgctctctgggtgggtcagatgtgctctggaagccatgtgtgtgtgtgtctgttgccagcgttaggccaagtgcgatgtcatgtttgtgtgtgtgtctgttgccaacgttaggccgagtgcgatgtcatgtttgtgtgtgtgtctgttgccagcgttaggccaagtgcgatgtcgtgtttgtgtgtgtgtctgttgccaacattaggccaagtgcgatgtcgtgtttgtgtgtatgtctgttgccaacattaggccaagtgcgatgtcatgtttgtgtgtgtgttgccaacgttaggccaagtgtgatgtcatgtttgtgtgtgtgtctgttgccaacattaggccaagtgcgatgtcatgtttatgtgtgtgttgccaacgttaggccgagtgcgatgtcatgtttgtgtgtgtgtctgttgccaacgttaggccgagtgcgatgtcatgtttgtgtgtgtgtctgttgccaatgttaggccaagtgcgatgtcatgtttgtgtgtgtgttgccaacgttaggccaagtgcaatgtcatgtttgtgtgtgtgtgtctgttgccaacattaggccaagtgcgatgtcatgtttgtgtgtgtgttgccaacgttaggccgagtgcgatgtcatgtttgtgtgtgtgttgccaacgttaggccgagtgcgatatcgtgtttgtgtgtgtgtctgttgccgttaggccgagtgcgatgtcatgtttgtgtgtgtgtttgttgccaacgttaggccaagtgcaatgtcatgtttgtgtgtgtgtgtctgttgccaacgttaggccaagtgcgatgtcatgtttgtgtgtgtgtctgttgccaacgttaggccaagtgcaatgtcggagaggtggtgttgggtgtttccgccacatgttgtggcatggagggcccctgcttcccagcgtcctgtgaggggctccacatgatgtctgagctgccctttcttttattttgctgccattaatgtgtctctcttttttattctttgacctagggaagatttaggattcagatttatatcggaacaggtcagtcaccacccccccatcagtgcgttccactcggaaggtctcaaccatgacttcctgttccatggctccatctaccccaagctcaagttctggggcaaaagcgtggaggcggagccccgaggcaccatcaccctggagctgctcaagtgagtgtcggtgcgtcctgctgagatccgcttcctgcagaaactgaaatgggtgctggtgatgtggagggaaagcttccttcaggaggaaaccctgtcatttttctcctgaggtggggacctccccacagcagaaacgtcttcagatgagcttcctgaccagggtcccgtgttgctggggtgcgtcctcacgtctgcagttggaattcgcccccctttcggtcacatcattcattgtatgaccagggtcccatgttgctggggtgcatcctcacgtctgcagttggaactcaccccgctttccggcatcattcattgtatttcttgtcttttgctgcataactgtcccaaacttagcagcttccacaccaggctggcaggtgtctgagggccggggaccgtgaggttgcggtggcaatgagggttgggttgcccatggcgcctgtgtcctggctccccttctgggctgcttgctgcagggcactgcctcccacagggggagagagctgagaaggaagccagggaagtggccctttgcacactcccccaccctgtgctcatgtggcaggggtgacttagggttggaatttgaaacagcgtgggaggggaccctctgagaggctgcttgccacccctcttcactctcagcctaaatgctccccaatccagtgtcaaccaaagacacctcagagcaaaacacaagtctccaacaaatgccggccgctaagacccgacagacacagaccggatgctggcgtcctcctgggccaccagttctgagacgtgagtcttgccaagccactgcctgcagtcttgttgtaggcagcaggtcctaacaaatacatacagaaataagtaataaacgacaccttgcctgatgaagcatttgatttgggttttgcttcacattggccctgcctggatggtggctagaaggttccacaaggacctggagaagcccctgagagtgtgtcctggggctggtatggccgagtgcctgttgtgcagtggccttgcttaattaagaggcatgcagaaatgagaagttgcacaccttgctgataaagttgcacaccttgctgataaccttgctgatgaaccagtttgggttccacccccaggaaattgagagaattccagacgtgtggcaaaataccctgctctgagcagatttctgccttcactgtggctcccccacgtagcaccttagaacatagggctgctgatctgctgcctcacattggtggggtgttttcttcttgggcagggccatttgggaggatgaggagtaaaggaaacaagtatgtggagtgcggttgaaaaccctgcacccctccacagccatgtgccagctccccagaaagccagggccgcatgcccaggaccctgcattactgccgtgtgtgtttcgtgaggtggcctttcttttgacgacttcacaggaaagccatttgtctttgttcagtcttctttgattgcttattaacttgtcttgacatttaagtagaaagctttgtagatgctacaaaggaaagaagaagtacatttcaaacgcatgctaaatacacagcctccgtcgcaggggcttcaaagcagcgtgctgctctcccgcgggtgccggttgctgtgacccagccccgcctggtcgttgcgtcttgggtcacgtcgtgtcttggcttttctggactctcactgcttgttttctggtgtcttcacagacataatgaagcctacacctggaccaaccccacctgctgcgtccacaacgtcatcatcgggaagctgtggatagagcagtatgggacagtggagattttaaaccacaggtgacagcaccccaccgttgggtgagagcgcgaggctccgggtggggatgggcgagccggggagcgtgagcatccgtgctcctggtgggttttagctcagcctcacgagctgctgccgtgtccccgccagcccaggcatagcagctgcctagacttgactctgaccggtgttggccatgaatgctcctcgttcaagacctcgtttttcgtcacggttgttactttaaggctttgagctatgctgaagagctgtgtcattgccaggtgcagcgcagtggccgtccacggccgttggccactgtctaggcttgaatgccctattcctggaagctcatgactggtgggctttgccttttcaccactttagtgaggtataatcgatgcatcataagactcgcccattctgaatggacacttaagtgatttttagtaaattgaccgaatcatggagccgtccccacagcccatttcaaacacttccatcgccccaaaggcccaccacacccatttgcagtcaccccccgcctgccccaggggcctccaccgcgcttctcctgttacagagttaccctttccggctgtttgctgtcttgcagcagaaacctgtgtttgtttttctcacagaactggacataagtgtgtgcttcactttaaaccgtgtggattatttggaaaagaacttcacaaggtggaaggacacattcaagacaaaaagtaggtccttgccaagtgttcatggggcaccactacagcctgtgtgtccacgttagaagggctcaggtgctcctgggcctgcgtgtgcctacgtgcatgagacgcgggtacaccagtgccatctgttcatggtccagaagtatgactcttttttgttttggaaagacattttgttattgagcataaaaggaaataaagggtatttttgaatgtagtttctaggtggcttgttactggggccatcttcttttgataaaattgtcttgagaagtcagctatttccactgggagatgagaggggactgtttcgcagcagagctgaggtgggtgggaagtgtggccttgcgttttccttctaccagcaccccatgcacgttgtcaggcaagactcaaatgtgttagcttgaggggcgtcagtgtcacgtgaccagttcactccagtctttaaatcagggactttcgcaagtttttgtgagcagagaaatggtcagtactgttccaacaaatttttcagtttttttctccccatttgggttaattactttgtaatctgggtctcacatttgtttttttcgtaaggaatttgagccatagaatgtcatgaagttccttctagttccaaaaatgtagacatttcccattagaaactagtccccaatttaaaacagtcagggccaggtgcagtggctcatgcctgtaatcccatcacttctgaggtgggcagatcacctgaggtcaggagttcgagaccagcctggccaacatggtaaaaccccgtctctactaaaaatacgaaaattagccaggtgtgatggcgcacatctgtaatcccagctactcaggaggctgaggcacaagaatctcttgagcctgggagatggaggttgcagtgagccaagatcacgccaatgcgctccagccggggcagccaagcaagaggctgtctcaaaaaaataagacagttggtgtttctgctctgtccaccctctatggtagaccagaaatgcacccgtttgaacagcctataaaataaaatggccaggcttatgactgaccatttctcccataaaacatgtgaggatcaacatgtggacctagaagggacagcagtcttacaacagggtagcagtcatcagtgccttgacacctctcccccttggaactcagcccagggagcagctggctgtctgtttccagaaataggcgggggcgccgaggccaacactcgctgaccctcagtgagtgcatgtaaaacatgtttttccagaaccgggcagggaccccgaggccagactcgctgaccttcagtgagtgcatgtaaagtgtgttttggttgtctggttttccatcctaaatttaagggtgctctgtccttggagacagagttgtccccaggctgtctactaggtgaggcctggcccagttccccgcgtctgtgtgctggctctgcaggcactgcagtgacaccgtcccctcctgggtcccgagtctgtcagagttgcacttcccgggagtctgtggtcacggttgactcttcccagcaagaggcgaaaggagaaagaaaatggagtctggcactatttggcttcatcccttttagaatcgagagctctggtggccactctgcaaaggtctctgggttgttattgatgaaaaaaggcaggcggggaaccaaagatcaagcaagcagcattgactgcactgattgatagaaaagggctgaaggacacacacacaacacattgagtgtgttgaaaatgatcagtgggcgcatgcagctttacattttaaaacgctcactcttttttgccccttcccgtctcctgcagccccctggaccaaccatcctttgggtttccatcccttcccgtctcctgcagtcccatgggccatctctcttttgggtttctgtcccttcccatctcctgcagcccggtgggctgtccatcctttaggtttccggcccttcattttcctttccgtggtgtgtatcggggctacgaatggtcccagaatgcaaattttcaccttcgcatttatgtccagagatgtcccaagatgcataagaaaacatacctgaggggaatttattccagggtgccacatgtttagacaaatggtttgtaatgactaagacttgtctttaaaaatcccatttaattacagcaaaaagaagctctttatgatctatggcaaatggacggaatgtttgtggggcatagatcctgtttcgtatgaatccttcaagaagcaggagaggagaggtgaccacctgagaaaggccaagctggtaagggctggggcgtccccgggcagagctgagccctgggtgctgagggctgccaggccgctgctgcctttagctcacctgttggggtcccagggaacctttgggccccaccaggagagatgaatgtgcagaatttgtctgtccagatgaaccatatattgtgggttccagtatcagtgagggggtttatctgtatttctttccattttttttttttttcccctccaggcagggtctccctctgttgcccaggctggagtacagtggtgcagtcataactcactgcaacctccagctaccaggctcaagcaatcctccctccttagcctcccaagtggctaggactataggcatgtaccaccatgcctgactaatttttattttttttagagatggggtcttgctatgttgcccaggctggtcttgaactcctgggcttaagcagtcctcccacctcggcctcccaaagtgctgggattactaataggcatgaaccacaacacccagccggcatatctgtattttggttgcacggaggctgctgctataaaccgtgggcaccagtgcccacgagtcatacataattgctggcccccatggctggaagtatctgagggaacctcaggcaaggccgtttcttttctggaagctccaagttctgggtccttcttaataaatcttctcgctttctttgagttagcctagacatattgttaaaaatcaagtgaatttcaattttttgtttttagttgtgagtaccagataatatattcaacagccagaaagtactggcaaggcttttccccttaaagctttggaatactcattatcttaagactagttgttcttgaacttaaaaataaaagggatagttcaaaagaggtgtcctattttctacataatgaattggaatgtaccaaacctgaaatgttcaatatttatttaacggaaacattcagcctcctccggatcccaagtgttttttatgttgttgtattcatttgtgctgttagacaccttttctaatcaccctcttttatttaaaaaggaaaattctgcttacacactagacagacctagaagggtaaatccatttagcgatgtcttttgatgctttcctgctccttgaggtgacctagaaacgggagttttctgtgaatccttgtccttgagctgcggctctccctcgccccagcctcgggccatggtgcctacagccagtgtgaatacagctagtgcaggaagccctgggctttgactcgcttgttttcagtggtctccctgaagagctgcttctggaatcattcccttttctaggacccatttattttgagaagcaatgtggcaggttttgtcttttcatcagggtgtagagagcctgaaacccccacacaggagccacttcttgatgggggcaaagctgcgctatctagaaagctctcagtcccagaacctgccttctggagaggcgccatgtgtgtgaatgaacctgctgtttggaaggcaccgctgtgtcgtcgcactcagactccatgaagccaccgctgtgtcgtcgcactcagactccatgaagtgctgtttcgcgtgcaccgcttctcccgaagggaaacacgcctggccactgacttccttcatctccacgaagggaaacgcctggccactgacttccttcgtctctgcgaagggaaacgcctggccactgacctcctgtcgtcacccgaagggaaacacgcctggccgctgaccttctgtcatctccgtgaagggaaacacgcctggccactgacctctgtcgtctctgtgaagggaaacacgcctggccactgacctctgtcgtctccactctgggtgtccgttagaacagacagcacagccctacgaagggagtgtgagctgctttagggactggggcccagctcctctccgtacagtgatggacagacagtgtcatagactggagaggaaattctattttctccttagtttaagaaaaaaaaggccgggtgtggtggcttacgcctgtaatctcagcacttttggaggccgaggtgggtggattgcctgaggtcaggatttcaagaccagcctggctaacatagtgaaaccccgtctctactaaaagtacaaacaattagccgggcatggttttgggcacctgtatttccagctactcgggaggctgaggcaggagaatctcttgaactcaggaggcagaggttgcagtgacccgagatcgcaccattgcactccagcctgggcaacagagcgagactccgtctgaaaaaaaaaaaaaggagaaggctgcctggctctgctcaggtgactggtctgaaaggcgctctgagaatagctgtcctcctggccaagagcggcctggccccgggcagccacacagcagggttctgtgtttcaggatgaagactccgggaaggctgacagcgacgtggctgacgacgtgcctgtggcccaggagaccgtgcaggtcattcctggcagcaagctgctctggaggatcaacacccggccccccaactctgcccaggtctgtgtccctccatggcctgacgtctctgcctgctcatgtcacacccacctctgggcccagccccacggctcttccctgtccttgggcccttgcctgccgcctcgcctcagcctgttgtcccagagcagacaggggcctccgccattgtcggagtggcttctgttgtccctggagctgcgtcccggccctgtgcttgtctgccttggggcctgctgttggggctgggcaccgctgctccataggacatgcaggtcgaggtgtggacgcatgctcagctgcgtgtcagagctgcccgccgggcacacatgcttgtgcttcccctgggaacatcagacagacgtggccattgccggccaagtgcgtcttatcaaaagaggcttccaagcctgtttggggagattgctttctcacttgtcaatttagatgctcaaatgccttgtgatatttatttttgaaaattgcacttataatttttattaaatatatgataaactacatgttttatgacaaataaaatatgtgatatatggttatatgataaatatcacacgtaatatcttagtattttttataaattcttatttgtatataaaatttatgcaacttatgcaattttgtacgtcccataaacagagcagaacatgcgtaaaatacagaaaaggaagcaaaaccttcactttaagcacgttatctcaacagtcactgttatcatttgagtagagtacgaactggtttaacaatgctattttcttttttaatagaggcagagtctcgctctgtcacccaggctgcagtgcagtggtgtgatcttggctcactgcaggctccaatttctgggctcaagtgatcctcctacctcagcctccctagtagcgaggaccacaggcgtgtgccaccatgccagactaattttctattttttgtagagaggaggtcttgctatgttgcccaggctggtctcgaactcctggcctcaagcattatcttcctgccttggcctcctgagttgctgggaccacaggcatgagacactgtggcctgccaatgatactattggtattttaaatttattattaggaaaattgcgtatgttttttttcagggaagtctctttaaagataactcatgcttccagcctttggctcagcgtatgtgttgagtcctcctgcctgccaggccctgtgggcctgggcactagaaccaggcagacgaggtcccaggagggaggcggggcaggtggttgactcacacctgagagccaggtggtgccttgggtgccagggagggcatctgagtgctgtggcttcagtcatggggtaggggtgggggtgtctagggattgcgtttgggcggaggggacagtcagggcagagacccctggagtagactagtgtgtgagggcccagggggccatggggatgagggtggagggggtgcaggggtctccagacgacttcagtatttgctgtgagtgacatggggcaccaggagtcatttgagcagggggtgacgggtgctgttgatgtttcctgtggcctttctggctgcttgctgagatgctgtgagggcagcaacagaagagggaggacacgggtggtggctggagggcctggctgtggtgggaggacctgagtggagccagggccctgagggctgcagaggccggaggctgtgggtgcagaggctgggaggctgtgggtgcagaggctgggaggctatgggtgcagaggctgggaggctgtgggtacagaggccggaggctgtgggtgcagaggctgggaggctgtgggtgcagaggccggaggctgtgggtgcagaggctgggaggctgtgggtgcagaggccggaggctgtgggtgcagaggctgggaggctgtgggtgcagaggccgaaggctgtgggtgcagggtgctgccgcaggcctgctcgggtgtgctgtccacaagacgccgagcagacagctgcgagccagaagtcaggcagagcaaggctctgggagtcctgggcacggggggactgtcataccctaagcattccagttgttaatgtgacaaattaacttgctccagggctgaggctttggcaggtgaaggggtaaagaggaggaacctgtgggcaggtgtggctgagggcaggaaaggagcaggtacaagctgagggtttagcagtgggagacaggtggcgtggctggagtgtttccagcaagctggtgacaaatctgttgatgagattgtaaagacagaaaaagaaatgtgtgtgagttttgctggtatacctcaaaatgcaaacgttacagccgcagtgcatgatacgtgcttagtgaagacggcagaggcattgaatttgcaggtggaagacgtgagcggaagtaggttcccatggtggcagtcaggtagcacctgcgggatttcaggggcccactgggggtcttggagcatagtccatggttcagaggccctgctgaggtcgtgtctctgtgccttgctccacagatgtataatttcaccagtttcactgtgagcctcaacgagctggagacaggcatggagaagaccctgccacccacggactgccgcctgcgccctgacatccgcggcatggagaatggcaacatgggtgcgtccacgcagtcagaggaggaagcttggggccaaggacgccctggctagggtgggagagcacaaagcactcgctggcagaagccaggctctcgcctacaaggggagccccgtccctctccctaaacaaacaggcaggctgcaggccttctaactaggcttctcagaccgtctgtggtgaagggctttaaagatctctcgcctgcctcagaccaaaccttttgtaaataaattaaaattacattactagaaaatgaaatgaaaaaatacatacaaagtacaaatcctaggccgagcgcggtggctcacgcctataaccccagcactttgggaggctgaggcaggtggatcacccaaggtcaggagttcgaaaccatcctggccaacaaggcaaaactccatctctactaaaaatacaagagattaggcggtcatggtggcgcccgactgtaatcccagcttctagggaggctgaggcatgagaatcgcttgtacccaggaggtggaggttgcagtgagccgagattataccactgcactccagccagggcgacagagtgagaccctgcctcacaaacaaacaacaacaacaaaaaacacaaacaaaaaacaaagtacaagttcctaatttgttattattaaattaaacaaaagttaagattacatttagaaaactgcacgtgttccactgtgaggatccgtgtagccatcagtgcagtcactggcacgtgtgtggcgtgtcctgcagcctcacactctcccggtgggctctgtgcttgcagcgttcatctgtaacatggcagatgaacaactttctcactcactcatctagatggaatccgcagtgaaactcctggctgaggaggcaaatccaaagtgtcctgggttttgagttagtaatgttttatttatttatgtttagagtcgggatctcactctgtagcccaggctggactatagtggtgtgatcttggctcactgcagcctcaacctcccaggttcaagccatcctcctgcctcagcctcccgagtagctgggactacaagtgcatgccactacacctggctaattttttgggtttttttttttttttttttttttgagacggagtctcacgctgttccccaggctggagggcagtggtgcgatctcggttcactgcaagctccgccttctgggttcaggccattctcctgcctcagcctccccgagtagctgggactacaggtgcccctgccaccacgcccggttaattttttgtatattttagtagagacagggtttcaccatgttagccaggacggtctcgatctcctgaccttgtgatccgcccgcctcagcctcccagagtgctgggattacaggcatgaaccactgtgcctggccaggtttttttttttgttttttttgttttttttttttgagacagagtttcacacttgttgcccaggctggagtgcagtggcgtgatctcggctcactgcaacctctgctcacaggttcaagagattctcctgcctcagcctcccgagtagctgggattacaggtgcccgccaccacacccggccaatttttgtatttttagtagagacagggtttcaccatgttggccagcctggtctcaaactgctgacctcaggtgatccacccgccttggcctcctaaagtgctgggatgacactgtgcctggcctaatttttgtattttttatagagatggggttttgccatgttgcccgggctggttgccaactcttgggttcaagcgatccgcctgcttcagccctcctaagtgctgggatgcaggcatgagccaccgcgcccagcttgaattagtgatgttttcagagagaaacccagctcacgagtgtgacctgggaatggatgtaacttctcatgctttgtattcagaatgtgtgcccagtccttcacagaagccacatggcagttacccgggaaggtcaaggctaaagggagctcgtctttgggagatgggctctgagttgcacaggtggggctggctccccgtcctgagcgcctgctcgcacaccagggcattgggtggtgcctgggccctgcctgtccttcagactcctgcacccgcagactttgagtagtgctgtcgtagaacacgcagcacatgcagcccccatgctctactcagctccgcttgggaagggccctgttggcgtgccggccgctgtggcctcggcaactgtgattgtgtttggtctcccgatcacagaacctgttgtctgtggcattccagccacagtgagacatgccaactagagatctaggtgcatagggggtggcggggtgcggttctaaggtctctgtctgacctaaactgtttgcttggatcctagatctggccagccaggagaaggagcggctggaggagaagcagagagaagcacggagggagcgggccaaggaggaggcagagtggcagacgaggtgagtactgtggtagccacgcaggctggggcagcggggaggccccacacacacctggggacggcggggaggccccacacacacctggggacggcggggaggccccacacacacctggggacggcggggagtgccttctctcacccccacacccctgtggctgggcagttactgttccatggctccattaaggtagtgacaccagtggctgcccctgacccatgtggttcccactgcccaggtaagagcccatcctagcttagcgcacactttgccgagaccacccggctgggggtggcctgtgcagagtgcctgtcacctcagacccgggtctactgccgggcctcatggtgtgttggcccaaagctttcttttcaactgtggcaaagttaaagagaaaatgttgcctgaatgtgactgctccctttaggaaaacacagctggtgagtgtatgggtgaggtcccccaggggccacagcccgtgtgtagggaggtggcaccgtgtggaggccacgcctgtcacaccgataccacatcttcctgtcagtgccactcaggctgatcttcaccccatgacccagaaaggttttgtgaaaattaaatcccgtgtgctgtgccgtggcgtctgtgcacatggaggctgggacggtggcatgggctgcgtgggcctcacagaagcatcagctgctgggacatgattcctgtttctgtaactgtcctaagctggctgtagtttgttctataatagtcataagagaaaagaaccattgaataaggattcaatcaataatgtactgtaataagtataatttaaaaatgtatttataagtaaaatgttttagtttgttagaaaaatctttgggtgtttgtgaagcatcttaattctgtaggccacctgcttggtaggattcgttctcaaggcccaacaacaatgatacccggtggcttacatgtggctggcgttttgaaaccaattctcactgtttgggcttccaatttaatttgatactaggctttgaatggtttgatatttggaatttgcccttaatccagagaaaaatcagcttcaaaatagttaacctttcctcatttttttttttttttgttgttgttgcccaggctggagtgcagtggcgtgatctcggctcactgcaagctccgcccctccgggttcacaccattctcctgcctcagcctcctgagtagctgggactacaggtgcctgccaccacgcctggctaattttttttttttgtatttttagtagagacggggtttccccgtggtctcgatctcctgacctcgtgatccgcctgcctccagcctcccaaagtgctggaattacgggcgtgagccaccgcgcccggcctgttcattgtttttttaaagtgttaaaaaaaatatactgtgaaaataatgatcttttgtccttcgaagaaaatgtcttctcctttgtgagcgctgcccccaccccacccccaacactaaggacacccctcgggccctgagtgccagccgggggctgtggacggcggctgaaccagcgccaacactcaggccctgtgctaccttctctttgcctataatgtcttcctttgtcctcagttaaaaaaaccaatacttggtttgctttaaatgacagcacatgtgaacagtgtaactgcttttgccttgaaaagggagaggcattatttaggctccagtaacttctctgataagggcccagtgtgaggattttgtgttgagttaaaccctcaagattttgttgggaagtgaaattgacacgggtggctggatatctttaggttccagcattcacatgaccacgtgatcaataattctccgttgaagttgttacgctgggctgcattttaaaacccacgttaccgtgatggtgctgagttgggggaacacactcctgcacccagaacagggctgcgttttccttttgggctgagcatcttctgacccccctcccttgtatccggcaggtggttctacccaggcaataacccctacactgggacccccgactggttgtatgcaggggattactttgagcggaatttctccgactgcccagatatctactgagggcctggaggggcctggggcccgggaccggaggctgacgaggctggacttcctcgagtggccactgtgagcctcgtcacagcagaaaccaacttttctaacgactgagttcgcggagatagcatcatccctgatcaaggatgtaattctaattaactgttgattgccaaacatttcactctgctgtgccgtctcttcataaagcttcacttgggatcatcgtcttcattaaggtttcaacagggaaattcttcacggcgcccttttatgtggcagaaatcagctggggcttgtttagcttccagcacactctcagtcatagcatgtgtagctaaaggaagtaatgggaaggggttcatgttctctttataatgcagtggcaaaaggttctgaaagccttttaaactcgaaccagtgggggaaagatggatcttgaagctaatcctgcagagagttttatagaggccagggattgccttctaaattatgataaaacagaagtgaagagtttcagagcatcagattgagtgaaaagttgtcagattctgtattttttaacaatcttcaataatgtaaagattacttttaaaatatttaagttaaaactacttgaatagtattttgctgaagagcaagatatgcattaatcaccggttttatactgtccaaaatgaagcatccccgtgacaaaccagagtgggcagaagcatcgagagcgtgacaggaaatcccaagactgcttccgcctcagaggcgtcccggctgcgattcgctgccctgttgtcagtgaggcctggctgtcaccgcacaccgcgtccgtgtctccagggggttcctttcttctcacacgtcgcgtgtacccatagcactcttgtgtttctgtttttcccagtatgcatgtttaaaatagaagtgacaagaatcacatccggttgtgtcctgtgggagggtcagaggcagaatctacttacagtggtgtaattaaagttatttaaccaaaaataggtatgtgtccatctcagcattcacctttatcaagtgactgatttttttttcttttctttccttttttttttttttttgagacggagtttcactcttgttgcccaggctggagtgcaatggcatgatctcggctcaccgcaacctccgcctcccgggttcaagcgattctcctgcctcagcctcccaagtagctgggattacaggcacgcgccaccacacctggctgattttgtatttttagtagacacgggttttcaccatgttggtcaggctggtctcaaactcccgacctcaagtagtctgcctgcctcaacctcccaaagtgctgggattacaggcgtgagccactgcgcctggccgtgactgattttttttcatgtagaattgtcaacacgagagatcacagtggagcactttgaaagaccgtcggttgtgtgcacgcacgcacacactcatgcacacgctgacacgcggttgcatggagtccaggttactcaggccggcacttctgagtgacaggtgccacctgcgtgtgtcttggcgtccacatcacacctgtgacggaagcacttctggaagtgaacactcgttttgaaagcttgattttgtagctttggaagctggaagcgatggtgtttggtgccgagtcctgtgtcatcctcggggcctatgagctccgtaccagccactcaaaagtgtctgaacagaaccgctccgtgactggtagctgggtctgaggattcaggattgtggcgttattcaaagaggagactttgaaattccccgatggctggaatgtggagcccaggtgcctctggtggagggtcatctgcttttccagactgtggttgtgaaccggctccttctccaagaaaggttgcaagctgagaacatccagaggtgagactcagacacattgaaagtgactgcatttagggaggtttaacgagttcttactgatcattccacttgttactggttaagataatttgcccacgggtttgtttccaagtcctcttctaggaccaggctcctggtatttcaggggctggttggctgcacagacagcccctcttctgctgtccttgaggacagacaccaaaccagaggtggaggaagaacggtaggaaggctgatgg
